United States Patent Application Publication US 2007/0059710 A1 - sequence listing, part 2

SEQ ID NO: 4253 - DNA, 201 bp, Homo sapiens
gtgcgtgatggaggacagccgccactctccgctacggccacgctgcacctaatcttcgcggatagcctgcaagaggtattgccagacctcagcgaccgccsggagccctctgacccccaggcaaaactgcagttttacctggttgtggccttggccttgatctcagtgctcttcttcctcgcggtgattctggcaatctcc

SEQ ID NO: 4254 - DNA, 201 bp, Homo sapiens
actctccgctacggccacgctgcacctaatcttcgcggatagcctgcaagaggtattgccagacctcagcgaccgccgggagccctctgacccccaggcaraactgcagttttacctggttgtggccttggccttgatctcagtgctcttcttcctcgcggtgattctggcaatctccctgcgcctgcgactctcttccag

SEQ ID NO: 4255 - DNA, 201 bp, Homo sapiens
ctgaccctgacttgggccccagtggccaagtttcctactccatcgtagcgagcgacctgaagccgcgggagattttatcctacgtgtccgtgagcgcgcaragcggggtggtgttcgcgcagcgcgccttcgatcatgagcagctgcgcgccttcgagctcacactgcaggcccgcgaccagggctcgcccgcgctcagcg

SEQ ID NO: 4256 - DNA, 201 bp, Homo sapiens
ttttatcctacgtgtccgtgagcgcgcagagcggggtggtgttcgcgcagcgcgccttcgatcatgagcagctgcgcgccttcgagctcacactgcaggcycgcgaccagggctcgcccgcgctcagcgccaacgtgagcctgcgcgtgttagtgggcgacctcaatgacaatgcgccacgggtgctgtaccccgcgctgg

SEQ ID NO: 4257 - DNA, 110 bp, Homo sapiens
atgtcctagagagtactggcctctcagtaagtgcccatagtgatgtcaccatttttgtaagaggtaactatgtggtagacgctgtgctttgtaactgtttygtgaattaa

SEQ ID NO: 4258 - DNA, 201 bp, Homo sapiens; identical to SEQ ID NO: 4165

SEQ ID NO: 4259 - DNA, 201 bp, Homo sapiens; identical to SEQ ID NO: 4170

SEQ ID NO: 4260 - DNA, 201 bp, Homo sapiens; identical to SEQ ID NO: 4153

SEQ ID NO: 4261 - DNA, 201 bp, Homo sapiens; identical to SEQ ID NO: 4154

SEQ ID NO: 4262 - DNA, 201 bp, Homo sapiens; identical to SEQ ID NO: 4148

SEQ ID NO: 4263 - DNA, 201 bp, Homo sapiens; identical to SEQ ID NO: 4150

SEQ ID NO: 4264 - DNA, 201 bp, Homo sapiens; identical to SEQ ID NO: 4157

SEQ ID NO: 4265 - DNA, 201 bp, Homo sapiens
tcctgcagacctattcccacgaggtctccctcaccgcggactcgcggaagagtcacctgatcttctcccaacccagctatgcagacacgctcatcagccgsgagagttgtgagaaaagcgagcctcttctgataactcaggatttacttgaaacaaaaggagaccctaatcttcaggtgagtcaatcttataatagatcat

SEQ ID NO: 4266 - DNA, 201 bp, Homo sapiens; identical to SEQ ID NO: 4151

SEQ ID NO: 4267 - DNA, 201 bp, Homo sapiens
aagcaatgtgcagaatatggtatgttgtatgcttacatttgtgtaaagaaggagacagaatatttataaaaatccgttgccctatacaagacatatctccrgaaggatacctaagaaactttaacactcatttcccctgtgaaagcatttctcctcatctaaagcagagatgaaaggaagaacctatgctgaatgcatctt

SEQ ID NO: 4268 - DNA, 201 bp, Homo sapiens; identical to SEQ ID NO: 4159

SEQ ID NO: 4269 - DNA, 201 bp, Homo sapiens
tttacaactctgagccacctcatttccttaaatttccttttctgtgctgggtgtggtggctcacacctgtaatcctaacactttgggagtgtgaggaggayggattgcctgagctcaggagttcgagaccagtctgggcaacatggtgaaacccagtctctactaaaatacaaaaagttagctaggcgtggtggtgtgtgc

SEQ ID NO: 4270 - DNA, 201 bp, Homo sapiens
tgggttctggactgatatgatttacgctgcttagtaaggtggcctcatccctattgctacaaattgctttcagatatttctgtcatcatgtggctctgggwttattttatatgagggaaaatattttgtgtgtaggggatatacaacacttttgttctttgtgctttcatttaggttctgtgagaattcaaaattcatgaa

SEQ ID NO: 4271 - DNA, 201 bp, Homo sapiens
atgacatcactattgagactttcttgatttccaaggaaaatataagtttttggagtcttttctcttgtcatcatgtgagcctctttcaaaggttgagttamttgggttctggactgatatgatttacgctgcttagtaaggtggcctcatccctattgctacaaattgctttcagatatttctgtcatcatgtggctctgg

SEQ ID NO: 4272 - DNA, 201 bp, Homo sapiens; identical to SEQ ID NO: 4152

SEQ ID NO: 4273 - DNA, 201 bp, Homo sapiens; identical to SEQ ID NO: 4162

SEQ ID NO: 4274 - DNA, 201 bp, Homo sapiens; identical to SEQ ID NO: 4163

SEQ ID NO: 4275 - DNA, 201 bp, Homo sapiens
cagcagactacaacgtcacaatcatagccaccgacaagggcaaaccagccctttcctccaggacaagcatcaccctgcacatctccgacatcaacgacaaygcacctgttttccatcaggcctcctatgtggtccacgtgtctgagaacaacccacctggcgcctccattgcacaagtaagcgcctccgacccggatttgg

SEQ ID NO: 4276 - DNA, 201 bp, Homo sapiens
ccgcgggagctgttgtcctacgtgtccgtgagcccgcagagcggggtggtgttcgcgcagcgcgccttcgaccacgagcagctgcgcgccttcgagctcayactgcaggccagggaccagggctcccccgcgctcagcgccaacgtgagcctgcgcgtgttggtgggcgacctcaatgacaatgcgccacgggtgctgtac

SEQ ID NO: 4277 - DNA, 201 bp, Homo sapiens
cgcgggagctgttgtcctacgtgtccgtgagcccgcagagcggggtggtgttcgcgcagcgcgccttcgaccacgagcagctgcgcgccttcgagctcacrctgcaggccagggaccagggctcccccgcgctcagcgccaacgtgagcctgcgcgtgttggtgggcgacctcaatgacaatgcgccacgggtgctgtacc

SEQ ID NO: 4278 - DNA, 201 bp, Homo sapiens
gtgacatgctatactcaggaagaagttcctttcaaattagaatccacctcgaagaattattacaagctggtgattgctggagccctaaaccgggagcagamagcagactacaacgtcacaatcatagccaccgacaagggcaaaccagccctttcctccaggacaagcatcaccctgcacatctccgacatcaacgacaat

SEQ ID NO: 4279 - DNA, 201 bp, Homo sapiens
tctgctcaagatgcagatgtggaaggcaattcactgaagttatacaccatcaaccccaatcaatacttctctctgtcaacgaaggaaagtcctgatggaaktaaatatccggtattactgctggaaaaacctctagacagggaacatcagagctctcatcgcttaatcctgactgccatggatggcggggacccgcctcta

SEQ ID NO: 4280 - DNA, 201 bp, Homo sapiens
tgggacccaacggcagagtctcctactctattctggccagtgacctggagccgcgggagctgttgtcctacgtgtccgtgagcccgcagagcggggtggtkttcgcgcagcgcgccttcgaccacgagcagctgcgcgccttcgagctcacactgcaggccagggaccagggctcccccgcgctcagcgccaacgtgagcc

SEQ ID NO: 4281 - DNA, 201 bp, Homo sapiens
aaatggcatggtgacatgctatactcaggaagaagttcctttcaaattagaatccacctcgaagaattattacaagctggtgattgctggagccctaaacmgggagcagacagcagactacaacgtcacaatcatagccaccgacaagggcaaaccagccctttcctccaggacaagcatcaccctgcacatctccgacat

SEQ ID NO: 4282 - DNA, 201 bp, Homo sapiens
cactctccgccaccgccacgctgcacctaatcttcgcggatagcctgcaagaggtattgccagacctcagcgaccgccctgagccctctgacccccagacrgaactgcagttttacctggttgtggccttggccttgatctcagtgctctttctcctcgcggtgattctagcgatcgccctgcgcctgcgacgttcctcca

SEQ ID NO: 4283 - DNA, 201 bp, Homo sapiens
aaaagtgcgagacaaggattctgggcaaaatggcatggtgacatgctatactcaggaagaagttcctttcaaattagaatccacctcgaagaattattacragctggtgattgctggagccctaaaccgggagcagacagcagactacaacgtcacaatcatagccaccgacaagggcaaaccagccctttcctccaggac

SEQ ID NO: 4284 - DNA, 201 bp, Homo sapiens
gggcgcggacggggttcgggctttcctgcagacctattcccacgaggtctccctcactgcggactcgcggaagagccacctgattttcccccagcccaacyatgcggacacgctcatcagccaggagagctgtgagaaaagcgagcctcttctgataactcaggatttacttgaaatgaaaggagattccaacctacttca

SEQ ID NO: 4285 - DNA, 201 bp, Homo sapiens
cacaagtcacgcctgctgcaggcttcgggaggcggcttggcgagtacgcccggctcgcactttgtgggcgcggacggggttcgggctttcctgcagacctrttcccacgaggtctccctcactgcggactcgcggaagagccacctgattttcccccagcccaactatgcggacacgctcatcagccaggagagctgtgag

SEQ ID NO: 4286 - DNA, 201 bp, Homo sapiens
taacggttcctggaacccgatttccaattaaaactgcttttgacccagatgtaggcattaactccctgcagaactacaagcttagccccaatgactacttytctctggctgtgaatagcgtctctgagggggccaagtatccagagctggtgctggagcgggccctggaccgtgagaaaaaagaaattcaccagcttgtcc

SEQ ID NO: 4287 - DNA, 201 bp, Homo sapiens
gggcagcctcgagccctccgccaaacccaacgattcggacctcactctgtacctggtggtggcggtggccgcggtctcctgcgtcttcctggccttcgtcwtcgtgctgctggcgctcaggctgcggcgctggcacaagtcacgcctgctgcaggcttcgggaggcggcttggcgagtacgcccggctcgcactttgtggg

SEQ ID NO: 4288 - DNA, 201 bp, Homo sapiens
aatagaaattaaagatattaatgataatgctcctaatttcccaacagaggaattggaaataaaaattggtgaactaacggttcctggaacccgatttccamttaaaactgcttttgacccagatgtaggcattaactccctgcagaactacaagcttagccccaatgactacttctctctggctgtgaatagcgtctctga

SEQ ID NO: 4289 - DNA, 201 bp, Homo sapiens
gggcaacatcgctaacgacctggggctagagccccgggagctggcggagcgcggagtccgcatcgtctccagaggtaggacgcagcttttctctctgaatycgcaaagcggcagcttggtcaccgcggagaggatagaccgggaggagctctgcgctcagatcccgctgtgtctggtaaaaattaacattctggttgagga

SEQ ID NO: 4290 - DNA, 201 bp, Homo sapiens
cctccttcgtctctatcaactccaacactggcgtcctatacgcgctgagatccttcgactacgagcaatttagagacttaaagctactggtgacagccagygacagcgggaaccctccactcagcagcaacgtgtcgctgaacctgttcgtgctggaccagaacgacaacgcgcccgagatcctgtaccccgccctcccca

SEQ ID NO: 4291 - DNA, 201 bp, Homo sapiens
gagggggccaagtatccagagctggtgctggagcgggccctggaccgtgagaaaaaagaaattcaccagcttgtcctggttgcctctgatggtggcgaccstgtccactctggcaacttgcacatccaagtgatagtcctggatgcaaatgacaacccaccaatgtttactcagcctgagtaccgtgtgagtgtttgggag

SEQ ID NO: 4292 - DNA, 201 bp, Homo sapiens
atccttcgactacgagcaatttagagacttaaagctactggtgacagccagcgacagcgggaaccctccactcagcagcaacgtgtcgctgaacctgttcstgctggaccagaacgacaacgcgcccgagatcctgtaccccgccctccccacagacggttccactggcgtggagctggcgcctcgctccgcagagcccgg

SEQ ID NO: 4293 - DNA, 201 bp, Homo sapiens
tgtcgctgaacctgttcgtgctggaccagaacgacaacgcgcccgagatcctgtaccccgccctccccacagacggttccactggcgtggagctggcgccycgctccgcagagcccggctacctggtgaccaaggtggtggcggtggacagagactcgggccagaacgcctggctgtcctaccgcctgctcaaggccagcg

SEQ ID NO: 4294 - DNA, 201 bp, Homo sapiens
tgagatccttcgactacgagcaatttagagacttaaagctactggtgacagccagcgacagcgggaaccctccactcagcagcaacgtgtcgctgaacctrttcgtgctggaccagaacgacaacgcgcccgagatcctgtaccccgccctccccacagacggttccactggcgtggagctggcgcctcgctccgcagagc

SEQ ID NO: 4295 - DNA, 201 bp, Homo sapiens
atcaatattaccgcttagtgacggccacatccctggaccgcgaacaaatatcagaatataacattagtctgagagcctcagatgggggaagcccgccactstccacagaaactcacatcaccctgcatgtgattgacatcaatgacaacccacccaccttccctcatttatcctactccgcctacattccagaaaacaacc

SEQ ID NO: 4296 - DNA, 201 bp, Homo sapiens
aaactgcttttgacccagatgtaggcattaactccctgcagaactacaagcttagccccaatgactacttctctctggctgtgaatagcgtctctgagggrgccaagtatccagagctggtgctggagcgggccctggaccgtgagaaaaaagaaattcaccagcttgtcctggttgcctctgatggtggcgaccctgtcc

SEQ ID NO: 4297 - DNA, 201 bp, Homo sapiens
gtgctgctggcgctcaggctgcggcgctggcacaagtcacgcctgctgcaggcttcgggaggcggcttggcgagtacgcccggctcgcactttgtgggcgyggacggggttcgggctttcctgcagacctattcccacgaggtctccctcactgcggactcgcggaagagccacctgattttcccccagcccaactatgcg

SEQ ID NO: 4298 - DNA, 201 bp, Homo sapiens
tatacgcgctgagatccttcgactacgagcaatttagagacttaaagctactggtgacagccagcgacagcgggaaccctccactcagcagcaacgtgtckctgaacctgttcgtgctggaccagaacgacaacgcgcccgagatcctgtaccccgccctccccacagacggttccactggcgtggagctggcgcctcgct

SEQ ID NO: 4299 - DNA, 201 bp, Homo sapiens; identical to SEQ ID NO: 4103

SEQ ID NO: 4300 - DNA, 201 bp, Homo sapiens; identical to SEQ ID NO: 4106

SEQ ID NO: 4301 - DNA, 201 bp, Homo sapiens; identical to SEQ ID NO: 4105

SEQ ID NO: 4302 - DNA, 201 bp, Homo sapiens; identical to SEQ ID NO: 4244

SEQ ID NO: 4303 - DNA, 201 bp, Homo sapiens; identical to SEQ ID NO: 4247

SEQ ID NO: 4304 - DNA, 201 bp, Homo sapiens; identical to SEQ ID NO: 4248

SEQ ID NO: 4305 - DNA, 201 bp, Homo sapiens; identical to SEQ ID NO: 4246

SEQ ID NO: 4306 - DNA, 201 bp, Homo sapiens; identical to SEQ ID NO: 4110

SEQ ID NO: 4307 - DNA, 201 bp, Homo sapiens; identical to SEQ ID NO: 4243

SEQ ID NO: 4308 - DNA, 201 bp, Homo sapiens; identical to SEQ ID NO: 4111

SEQ ID NO: 4309 - DNA, 201 bp, Homo sapiens; identical to SEQ ID NO: 4245

SEQ ID NO: 4310 - DNA, 201 bp, Homo sapiens; identical to SEQ ID NO: 4106

SEQ ID NO: 4311 - DNA, 201 bp, Homo sapiens; identical to SEQ ID NO: 4191

SEQ ID NO: 4312 - DNA, 201 bp, Homo sapiens; identical to SEQ ID NO: 4190

SEQ ID NO: 4313 - DNA, 201 bp, Homo sapiens; identical to SEQ ID NO: 4192

SEQ ID NO: 4314 - DNA, 201 bp, Homo sapiens; identical to SEQ ID NO: 4186

SEQ ID NO: 4315 - DNA, 201 bp, Homo sapiens; identical to SEQ ID NO: 4187

SEQ ID NO: 4316 - DNA, 201 bp, Homo sapiens; identical to SEQ ID NO: 4103

SEQ ID NO: 4317 - DNA, 201 bp, Homo sapiens; identical to SEQ ID NO: 4188

SEQ ID NO: 4318 - DNA, 201 bp, Homo sapiens; identical to SEQ ID NO: 4189

SEQ ID NO: 4319 - DNA, 201 bp, Homo sapiens; identical to SEQ ID NO: 4105

SEQ ID NO: 4320 - DNA, 201 bp, Homo sapiens; identical to SEQ ID NO: 4193

SEQ ID NO: 4321 - DNA, 201 bp, Homo sapiens; identical to SEQ ID NO: 4194

SEQ ID NO: 4322 - DNA, 201 bp, Homo sapiens; identical to SEQ ID NO: 4195

SEQ ID NO: 4323 - DNA, 201 bp, Homo sapiens; identical to SEQ ID NO: 4198

SEQ ID NO: 4324 - DNA, 201 bp, Homo sapiens; identical to SEQ ID NO: 4196

SEQ ID NO: 4325 - DNA, 201 bp, Homo sapiens; identical to SEQ ID NO: 4197

SEQ ID NO: 4326 - DNA, 201 bp, Homo sapiens; identical to SEQ ID NO: 4110

SEQ ID NO: 4327 - DNA, 201 bp, Homo sapiens; identical to SEQ ID NO: 4199

SEQ ID NO: 4328 - DNA, 201 bp, Homo sapiens; identical to SEQ ID NO: 4111

SEQ ID NO: 4329 - DNA, 123 bp, Homo sapiens; identical to SEQ ID NO: 4229

SEQ ID NO: 4330 - DNA, 159 bp, Homo sapiens; identical to SEQ ID NO: 4231

SEQ ID NO: 4331 - DNA, 201 bp, Homo sapiens; identical to SEQ ID NO: 4232

SEQ ID NO: 4332 - DNA, 201 bp, Homo sapiens; identical to SEQ ID NO: 4233

SEQ ID NO: 4333 - DNA, 201 bp, Homo sapiens; identical to SEQ ID NO: 4235

SEQ ID NO: 4334 - DNA, 201 bp, Homo sapiens; identical to SEQ ID NO: 4106

SEQ ID NO: 4335 - DNA, 201 bp, Homo sapiens; identical to SEQ ID NO: 4236

SEQ ID NO: 4336 - DNA, 201 bp, Homo sapiens; identical to SEQ ID NO: 4238

SEQ ID NO: 4337 - DNA, 201 bp, Homo sapiens; identical to SEQ ID NO: 4237

SEQ ID NO: 4338 - DNA, 183 bp, Homo sapiens; identical to SEQ ID NO: 4241

SEQ ID NO: 4339 - DNA, 201 bp, Homo sapiens; identical to SEQ ID NO: 4230

SEQ ID NO: 4340 - DNA, 201 bp, Homo sapiens; identical to SEQ ID NO: 4103

SEQ ID NO: 4341 - DNA, 201 bp, Homo sapiens; identical to SEQ ID NO: 4234

SEQ ID NO: 4342 - DNA, 201 bp, Homo sapiens; identical to SEQ ID NO: 4105

SEQ ID NO: 4343 - DNA, 201 bp, Homo sapiens; identical to SEQ ID NO: 4239

SEQ ID NO: 4344 - DNA, 201 bp, Homo sapiens; identical to SEQ ID NO: 4240

SEQ ID NO: 4345 - DNA, 201 bp, Homo sapiens; identical to SEQ ID NO: 4110

SEQ ID NO: 4346 - DNA, 201 bp, Homo sapiens; identical to SEQ ID NO: 4111

SEQ ID NO: 4347 - DNA, 201 bp, Homo sapiens
cgtgtccatcaactccgacactgggattctgtacgccctgcgctccttcgactatgagcagttgagagacctacagctgtgggtgacagccagcgacagckgggacccgcctcttagcagcaacgtgtcactgagcctgtttgtgctggaccagaatgacaatgcgcccgagatcctgtaccccgccctccccacagacgg

SEQ ID NO: 4348 - DNA, 201 bp, Homo sapiens
tacgtgtccatcaactccgacactgggattctgtacgccctgcgctccttcgactatgagcagttgagagacctacagctgtgggtgacagccagcgacascggggacccgcctcttagcagcaacgtgtcactgagcctgtttgtgctggaccagaatgacaatgcgcccgagatcctgtaccccgccctccccacagac

SEQ ID NO: 4349 - DNA, 201 bp, Homo sapiens
gcagcctcgagccctccgccaaacccaacgattcggacctcactctgtacctggtggtggcggtggccgcggtctcctgcgtcttcctggccttcgtcatygtgctgctggcgctcagactgcagcgctggcacaagtcacgcctgctgcaggcttcgggaggtggcttagcgagcatgcccggctcgcactttgtgggcg

SEQ ID NO: 4350 - DNA, 201 bp, Homo sapiens
ccgcggtctcctgcgtcttcctggccttcgtcatcgtgctgctggcgctcagactgcagcgctggcacaagtcacgcctgctgcaggcttcgggaggtggmttagcgagcatgcccggctcgcactttgtgggcgtggaaggggttcgggctttcctgcagacctattcccacgaggtctcactcactgcagactcgcgta

SEQ ID NO: 4351 - DNA, 201 bp, Homo sapiens
cagagcccggctacctggtgaccaaggtggtggcggtggacagagactcgggccagaacgcctggctgtcctaccgcctgctcaaggccagcgagccaggrcttttctcagtgggcctgcacacgggcgaggtgcgcacggcgcgcgccctgctggacagagacgcgctcaagcagagcctagtggtggccgtccaggacc

SEQ ID NO: 4352 - DNA, 201 bp, Homo sapiens
ctagaccgggaagaggtattcttgtacaacatcactgtgacagccacggacaaaggaacaccacctctgtctacagaaacaatcatctctctaaatgtggyagacaccaacgacaacccgcccaccttcccccattcatcctactcagtctatgtccttgaaaacaaccccaggggtgcctccatcttctctgtgaatgca

SEQ ID NO: 4353 - DNA, 201 bp, Homo sapiens
tgtcactgagcctgtttgtgctggaccagaatgacaatgcgcccgagatcctgtaccccgccctccccacagacggttccactggcgtggagctggcgccycgctccgcagagcccggctacctggtgaccaaggtggtggcggtggacagagactcgggccagaacgcctggctgtcctaccgcctgctcaaggccagcg

SEQ ID NO: 4354 - DNA, 201 bp, Homo sapiens
tccgctactctattcccgaggagctggagaaaggctccttcgtaggcaacatcgtcaaggatctgggactggagccccaggagttggcggagcacggagtmcgcatcgtctccagaggtaggatgcagcttttctctctgaatccgcgaaacggcagcttggtcaccgcgggtaggatagaccgcgaggagctctgtgctc

SEQ ID NO: 4355 - DNA, 201 bp, Homo sapiens
catggatggcggcgaccctgtccgctcaagcgtcgcccaaattctggtaacagttctagatgtgaatgacaacactccaatgtttactcagcctgtctacmgtgtaagtgttcctgaaaacctgccagtaggcacaccagtgttggcagtgactgccaccgaccaggatgaaggagtccacggggaagtaacttattcctt

SEQ ID NO: 4356 - DNA, 201 bp, Homo sapiens
gcgctggcacaagtcacgcctgctgcaggcttcgggaggtggcttagcgagcatgcccggctcgcactttgtgggcgtggaaggggttcgggctttcctgmagacctattcccacgaggtctcactcactgcagactcgcgtaagagtcatctgattttcccccagcccaactatgccgacacgcttatcaaccaggagag

SEQ ID NO: 4357 - DNA, 201 bp, Homo sapiens
cccaacgattcggacctcactctgtacctggtggtggcggtggccgcggtctcctgcgtcttcctggccttcgtcatcgtgctgctggcgctcagactgcrgcgctggcacaagtcacgcctgctgcaggcttcgggaggtggcttagcgagcatgcccggctcgcactttgtgggcgtggaaggggttcgggctttcctg

SEQ ID NO: 4358 - DNA, 201 bp, Homo sapiens; identical to SEQ ID NO: 4201

SEQ ID NO: 4359 - DNA, 201 bp, Homo sapiens; identical to SEQ ID NO: 4103

SEQ ID NO: 4360 - DNA, 201 bp, Homo sapiens; identical to SEQ ID NO: 4105

SEQ ID NO: 4361 - DNA, 201 bp, Homo sapiens; identical to SEQ ID NO: 4106

SEQ ID NO: 4362 - DNA, 201 bp, Homo sapiens; identical to SEQ ID NO: 4204

SEQ ID NO: 4363 - DNA, 201 bp, Homo sapiens; identical to SEQ ID NO: 4202

SEQ ID NO: 4364 - DNA, 201 bp, Homo sapiens; identical to SEQ ID NO: 4203

SEQ ID NO: 4365 - DNA, 201 bp, Homo sapiens; identical to SEQ ID NO: 4205

SEQ ID NO: 4366 - DNA, 201 bp, Homo sapiens; identical to SEQ ID NO: 4200

SEQ ID NO: 4367 - DNA, 201 bp, Homo sapiens; identical to SEQ ID NO: 4110

SEQ ID NO: 4368 - DNA, 201 bp, Homo sapiens; identical to SEQ ID NO: 4111

SEQ ID NO: 4369 - DNA, 201 bp, Homo sapiens; identical to SEQ ID NO: 4103

SEQ ID NO: 4370 - DNA, 201 bp, Homo sapiens
cgtggagctggcgccccgctccgcagagcccggctacctggtgaccaaggtggtggcggtggacagagactccggccagaacgcctggctgtcctaccgtytgctcaaggccagcgagccgggactcttcgcggtgggggagcacacgggcgaggtgcgcacggcgcgagccctgctggacagagacgcgctcaagcaaag

SEQ ID NO: 4371 - DNA, 201 bp, Homo sapiens
cttgggtctggcgccccgggagctggcggagcgcggagtccgcatagtctccagaggtaggacgcagcttttctctctgaacccgcgcagcggcagcttgrtcaccgcgggcaggatagaccgggaggagctctgcgctcagagcgcgcggtgcgtggtgagttttaatatccttgtggaagacagggtgaaactttttgg

SEQ ID NO: 4372 - DNA, 201 bp, Homo sapiens; identical to SEQ ID NO: 4105

SEQ ID NO: 4373 - DNA, 201 bp, Homo sapiens; identical to SEQ ID NO: 4106

SEQ ID NO: 4374 - DNA, 201 bp, Homo sapiens
actccctggctgaagacaccatccagggggtacctctgtcctcatacatatccatcaactcagacactggcgtcctgtatgcactcagatccttcgactaygagcagtttcatgagctacagatgcaggtgacagccagcgacagcggggatcctccactcagcagcaacgtgtcgttgagcctgtttgtgctggaccaga

SEQ ID NO: 4375 - DNA, 201 bp, Homo sapiens
taagagttcagagccgtgccaatggcgtcaagtacccggagctggtactggagcactccctagatcgcgaggaagaggccattcaccacctggtcctcacygcctccgacgggggtgaccctctccgatctggcactgtccttgtcagtgtgactgtcttcgatgcaaatgacaacgcgccggtcttcaccttgccagaat

SEQ ID NO: 4376 - DNA, 201 bp, Homo sapiens
actatgagcagtttcatgagctacagatgcaggtgacagccagcgacagcggggatcctccactcagcagcaacgtgtcgttgagcctgtttgtgctggaycagaacgacaatgcgcccgagatcctgtaccccgccctccccacagacggttccacaggcgtggagctggcgccccgctccgcagagcccggctacctgg

SEQ ID NO: 4377 - DNA, 201 bp, Homo sapiens
tctcaccgcggactcgcgaaagagtcacctgatcttcccccagcccaattatgcggacacgctcatcagccaggagagctgtgagaaaaacgatcctttgyctttgttagatgattcgaagtttcctatagaggataccccattggttccacaagccccgcccaacacggactggcgtttctctcaggcccagagacccgg

SEQ ID NO: 4378 - DNA, 201 bp, Homo sapiens
ctcaccgcggactcgcgaaagagtcacctgatcttcccccagcccaattatgcggacacgctcatcagccaggagagctgtgagaaaaacgatcctttgtrtttgttagatgattcgaagtttcctatagaggataccccattggttccacaagccccgcccaacacggactggcgtttctctcaggcccagagacccggc

SEQ ID NO: 4379 - DNA, 201 bp, Homo sapiens; identical to SEQ ID NO: 4110

SEQ ID NO: 4380 - DNA, 201 bp, Homo sapiens
cttcctggccttcgtcatcgtgctgctggcgcacaggctgcggcgctggcacaagtcacgcctgctgcaggcttcaggaggcggcttgacaggtgtgtccrgctcgcactttgtgggcgtggacggggttcgggctttcctgcagacctattcccacgaggtctctctcaccgcggactcgcgaaagagtcacctgatctt

SEQ ID NO: 4381 - DNA, 201 bp, Homo sapiens; identical to SEQ ID NO: 4111

SEQ ID NO: 4382 - DNA, 201 bp, Homo sapiens
ccacagatggttctactggcatggagctggcaccccgctccgcagagcccggctacctggtgaccaaggtggtggcggtggacaaagattcaggccagaaygcctggctgtcatacctcctgcttaaggccagcgagccaggactctttgcggttgggctgtacacgggcgaggtgcgcacggctcgggccctgctggaca

SEQ ID NO: 4383 - DNA, 201 bp, Homo sapiens; identical to SEQ ID NO: 4106

SEQ ID NO: 4384 - DNA, 201 bp, Homo sapiens
cgggttcaccacctggtcctcacagcctctgatggcggcgacccgccccgatccagcaccgcccacatccaggtgacagtggtggatgtgaatgaccacaygcctgtcttctctctgcctcagtaccaagtaactgtccccgagaatgtgccagtgggtacaagactgctcacggtacatgctatcgacctggacgaggga

SEQ ID NO: 4385 - DNA, 167 bp, Homo sapiens
atggcggctcagccgaggggcggggactacagaggattcttcctgctctccatcctcctggggaccmcctgggaagcctgggcaggacgtattctctactccgtgtcggaggagacggacaaagggtcctttgtgggagacatcgccaaggacctggggctggagcc

SEQ ID NO: 4386 - DNA, 201 bp, Homo sapiens
gctacctggtgaccaaggtggtggcggtggacaaagattcaggccagaacgcctggctgtcatacctcctgcttaaggccagcgagccaggactctttgcsgttgggctgtacacgggcgaggtgcgcacggctcgggccctgctggacagagatgccctcaagcagagcctcgtggtggccgtccaggaccacggtcagc

SEQ ID NO: 4387 - DNA, 201 bp, Homo sapiens
gtccccgagaatgtgccagtgggtacaagactgctcacggtacatgctatcgacctggacgagggagtcaatggggaagtgacatattcttttcggaaaawaactcctaaacttccaaagatgtttcatctgaactcgcttacaggagaaatatcaactttagaaggattagattatgaagaaactgccttctatgaaatg

SEQ ID NO: 4388 - DNA, 201 bp, Homo sapiens
agcgaggctggggatccagatgtgggcacgaactccctccagagttaccagctcagccccaatcgccacttctccctggctgtgcaaagtggagacgatgraactaagtacccggaactggtgctggagcgggtgctggaccgggaggaagagcgggttcaccacctggtcctcacagcctctgatggcggcgacccgccc

SEQ ID NO: 4389 - DNA, 201 bp, Homo sapiens
tcatctccagaggtaggacgcagcttttcgccctgaaccagcgcagcggcagcttggtcactgcgggcaggatagaccgggaagagatctgcgctcagagygcgcggtgtctggtaaactttaacatcctgatggaagataaaatgaatctttaccctatagacgtggaaataatagatattaatgacaacgttccaagat

SEQ ID NO: 4390 - DNA, 201 bp, Homo sapiens
tcaccgcggactctcggaagagtcacctgatcttcccccagcccaactatgtagacatgctcatcagccaggagagctgtgagaaaaatgattctttgctracatccgtagattttcaggaatgtaaagaaaacctgccaagtattcagcaagccccgcccaacacggactggcgtttctctcaggcccagagacccggca

SEQ ID NO: 4391 - DNA, 201 bp, Homo sapiens; identical to SEQ ID NO: 4103

SEQ ID NO: 4392 - DNA, 201 bp, Homo sapiens
atggagaatacagctcctggggttcggtttccgttaagcgaggctggggatccagatgtgggcacgaactccctccagagttaccagctcagccccaatcrccacttctccctggctgtgcaaagtggagacgatgaaactaagtacccggaactggtgctggagcgggtgctggaccgggaggaagagcgggttcaccac

SEQ ID NO: 4393 - DNA, 201 bp, Homo sapiens; identical to SEQ ID NO: 4105

SEQ ID NO: 4394 - DNA, 201 bp, Homo sapiens
gagaatgtgccagtgggtacaagactgctcacggtacatgctatcgacctggacgagggagtcaatggggaagtgacatattcttttcggaaaataactcytaaacttccaaagatgtttcatctgaactcgcttacaggagaaatatcaactttagaaggattagattatgaagaaactgccttctatgaaatggaggtt

SEQ ID NO: 4395 - DNA, 201 bp, Homo sapiens; identical to SEQ ID NO: 4110

SEQ ID NO: 4396 - DNA, 201 bp, Homo sapiens; identical to SEQ ID NO: 4111

SEQ ID NO: 4397 - DNA, 201 bp, Homo sapiens
ctccctggctgtgcaaagtggagacgatgaaactaagtacccggaactggtgctggagcgggtgctggaccgggaggaagagcgggttcaccacctggtcytcacagcctctgatggcggcgacccgccccgatccagcaccgcccacatccaggtgacagtggtggatgtgaatgaccacacgcctgtcttctctctgcc

SEQ ID NO: 4398 - DNA, 201 bp, Homo sapiens
aggtggcagacaccaacgataacccacccaccttcccccactcatcctactcagtctacatcgctgagaacaaccccagaggggcctccattttcttagtractgcacaggaccacgacagtgaggataatgcccagatcacttattccttggccgaagacaccatccagggggctccagtgtcctcctatgtctccataa

SEQ ID NO: 4399 - DNA, 161 bp, Homo sapiens
atggcggctcagccgaggggcggggactacagaggattcttcctgctctccatcctcctgsggaccccctgggaagcctgggcaggacgtattctctactccgtgtcggaggagacggacaaagggtcctttgtgggagacatcgccaaggacctggggct

SEQ ID NO: 4400 - DNA, 201 bp, Homo sapiens; identical to SEQ ID NO: 4103

SEQ ID NO: 4401 - DNA, 201 bp, Homo sapiens; identical to SEQ ID NO: 4284

SEQ ID NO: 4402 - DNA, 201 bp, Homo sapiens; identical to SEQ ID NO: 4105

SEQ ID NO: 4403 - DNA, 201 bp, Homo sapiens; identical to SEQ ID NO: 4285

SEQ ID NO: 4404 - DNA, 201 bp, Homo sapiens; identical to SEQ ID NO: 4286

SEQ ID NO: 4405 - DNA, 201 bp, Homo sapiens; identical to SEQ ID NO: 4106

SEQ ID NO: 4406 - DNA, 201 bp, Homo sapiens; identical to SEQ ID NO: 4288

SEQ ID NO: 4407 - DNA, 201 bp, Homo sapiens; identical to SEQ ID NO: 4287

SEQ ID NO: 4408 - DNA, 201 bp, Homo sapiens; identical to SEQ ID NO: 4289

SEQ ID NO: 4409 - DNA, 201 bp, Homo sapiens; identical to SEQ ID NO: 4290

SEQ ID NO: 4410 - DNA, 201 bp, Homo sapiens; identical to SEQ ID NO: 4291

SEQ ID NO: 4411 - DNA, 201 bp, Homo sapiens; identical to SEQ ID NO: 4110

SEQ ID NO: 4412 - DNA, 201 bp, Homo sapiens; identical to SEQ ID NO: 4293

SEQ ID NO: 4413 - DNA, 201 bp, Homo sapiens; identical to SEQ ID NO: 4292

SEQ ID NO: 4414 - DNA, 201 bp, Homo sapiens; identical to SEQ ID NO: 4295

SEQ ID NO: 4415 - DNA, 201 bp, Homo sapiens; identical to SEQ ID NO: 4294

SEQ ID NO: 4416 - DNA, 201 bp, Homo sapiens; identical to SEQ ID NO: 4111

SEQ ID NO: 4417 - DNA, 201 bp, Homo sapiens; identical to SEQ ID NO: 4298

SEQ ID NO: 4418 - DNA, 201 bp, Homo sapiens; identical to SEQ ID NO: 4297

SEQ ID NO: 4419 - DNA, 201 bp, Homo sapiens; identical to SEQ ID NO: 4296

SEQ ID NO: 4420 - DNA, 201 bp, Homo sapiens
tcacgtgaatgtggagatcgaggacattaatgaccacacgccaaaattcacgcaaaattcctttgagctgcaaataagtgagtctgcacagcctggcacamgatttatattaggatctgcccatgatgcggatattggtagcaacacactgcagaattaccaactcagtcccagtgatcatttctcactgataaataaaga

SEQ ID NO: 4421 - DNA, 201 bp, Homo sapiens
ccagtgttcagtcaagacgtatacagggtgagcctttcagaaaacgtgtacccggggaccacggtgctacaggtgactgccacggaccaggatgagggtgkcaatgccgagattactttctctttcagtgaagctagccagatcacccaatttgacctgaactctaacaccggggaaattactgttttaaatacattagat

SEQ ID NO: 4422 - DNA, 201 bp, Homo sapiens; identical to SEQ ID NO: 4103

SEQ ID NO: 4423 - DNA, 201 bp, Homo sapiens
acagcctggcacacgatttatattaggatctgcccatgatgcggatattggtagcaacacactgcagaattaccaactcagtcccagtgatcatttctcaytgataaataaagagaaatcagatggcagtaaataccctgagatggtattgaagacacctttggacagagaaaagcagaaatcctaccacttgactttgac

SEQ ID NO: 4424 - DNA, 201 bp, Homo sapiens; identical to SEQ ID NO: 4110

SEQ ID NO: 4425 - DNA, 201 bp, Homo sapiens
gcacgggcgaagtgcgcacagcgcgtgccttaggcgacagggacgccgtccgccagcgccttctggtcgccgtgcgtgacggtggacagccaccactctcsgccactgccacgttgcacctggtcttcgccgacagcttgcaggaggtgctgccggatatcactgaccgccccgacccctctgacctccaggctgagctgc

SEQ ID NO: 4426 - DNA, 201 bp, Homo sapiens; identical to SEQ ID NO: 4105

SEQ ID NO: 4427 - DNA, 201 bp, Homo sapiens; identical to SEQ ID NO: 4106

SEQ ID NO: 4428 - DNA, 201 bp, Homo sapiens; identical to SEQ ID NO: 4111

SEQ ID NO: 4429 - DNA, 201 bp, Homo sapiens
agcctggcacacgatttatattaggatctgcccatgatgcggatattggtagcaacacactgcagaattaccaactcagtcccagtgatcatttctcactrataaataaagagaaatcagatggcagtaaataccctgagatggtattgaagacacctttggacagagaaaagcagaaatcctaccacttgactttgactg

SEQ ID NO: 4430 - DNA, 201 bp, Homo sapiens; identical to SEQ ID NO: 4103

SEQ ID NO: 4431 - DNA, 201 bp, Homo sapiens; identical to SEQ ID NO: 4106

SEQ ID NO: 4432 - DNA, 201 bp, Homo sapiens; identical to SEQ ID NO: 4105

SEQ ID NO: 4433 - DNA, 201 bp, Homo sapiens
tttcggacagtcagcctacctggtccacgtgccagaaaacaaccagccgggtgcctccatagcgcaagtcagtgcctctgacccagacttcgggctcaacsgccgtgtctcctactctctcattgccagcgacctggagtcacgaacgctgtcgtcctacgtgtccgtgagcgcgcagagcggggtggtgttcgcgcagcg

SEQ ID NO: 4434 - DNA, 201 bp, Homo sapiens
cgcgcagccaggctacctggtgaccaaggtggtggccgtggacgcggactcggggcacaatgcctggctgtcctaccacgtggtgcaggccagtgagcccrggctcttcagcctggggctgcgaacaggcgaggtgcgcatggtgcgtgctttgggtgacaaggactcggtccgccagcgcctgctagtcgctgtaagaga

SEQ ID NO: 4435 - DNA, 182 bp, Homo sapiens
ccagctcccacacagaggctcccggctgcgcagaccttgcccagcacaccagattgccagctccgagacccgggactcctcmtgtcctgggccgaatgctcttttagcgcggtagagtgcactttctccaactggaaaagcggggacccagcgagaacccgagcgaacgatgggagggagct

SEQ ID NO: 4436 - DNA, 201 bp, Homo sapiens
tccagaatttaattttttcacatctgttgatcattgtccagccacacaagataacctcaacaaagatagcatgctactggctagcattttaactcccagcrttgaagcagataagaagattcttaaacagcaagccccgcccaacacggactggcgtttctctcaggcccagagacccggcaccagcggctcccaaaatgg

SEQ ID NO: 4437 - DNA, 201 bp, Homo sapiens
acgggaccaagactcaggggaaaatggggaagtcaggtgtagcttaagtagaggtgttccatttaagattcattcttcttctaataattactacaagctastaacagatgaggccctggatcgggagcagaccccagagtacaacgtcaccatcgcagccacagacaggggcaagcctccgttatcctccagcaaaaccat

SEQ ID NO: 4438 - DNA, 201 bp, Homo sapiens
actcgattccggaggagctggccaagggctcggtggtggggaacctcgctaaggatctagggcttagtgtcctggatgtgtcggctcgcgagctgcgagtkagcgcggagaagctgcacttcagcgtagacgcgcagagcggggacttacttgtgaaggaccgaatagaccgtgagcaaatatgcaaagagagaagaagat

SEQ ID NO: 4439 - DNA, 201 bp, Homo sapiens; identical to SEQ ID NO: 4110

SEQ ID NO: 4440 - DNA, 201 bp, Homo sapiens; identical to SEQ ID NO: 4111

SEQ ID NO: 4441 - DNA, 201 bp, Homo sapiens
ctggttatctcacaccctgaggaataaagattggaatccgcactggatgctggaagttgactcggagaaaattgcgacaggagggaaatggcggctctgcraaagttgccacactgcagaaagctggtcctgctgtgcttccttttggcgaccctgtgggaggccagggccgggcagattcgctattctgtgcgggaagag

SEQ ID NO: 4442 - DNA, 201 bp, Homo sapiens
gcgcacggcgcgagccctgctggacagagacgcgctcaagcagagcctcgtggtggccatccaggaccacggccagccccctctctccgccactgtcacgstcaccgtggccgtggccgacaggatccccgacatcctggccgacctgggcagcctcgagccctccgccatacccaacgattcggacctcactctgtacct

SEQ ID NO: 4443 - DNA, 201 bp, Homo sapiens
gatcctgtaccctgccttccccacagacggttccactggcgtggagctggcgccccgctccgcagagcccggctacctggtgaccaaggtggtggcggtgracagagactcgggccagaacgcctggctgtcttaccacctgctcaaggccagcgagccgggactcttctcggtgggtctgcacacgggcgaggtgcgcac

SEQ ID NO: 4444 - DNA, 201 bp, Homo sapiens
ctccactcagtagcaatgtatcattaagcctgttcgtgctggaccagaacgacaacgcgcccgagatcctgtaccctgccttccccacagacggttccacyggcgtggagctggcgccccgctccgcagagcccggctacctggtgaccaaggtggtggcggtggacagagactcgggccagaacgcctggctgtcttacc

SEQ ID NO: 4445 - DNA, 157 bp, Homo sapiens
gcccaactatgcggacacgctcatcagccaggagagctgtgagaaaaaggattttttatcagcgcctcaatctctactcgaagaagaaagagaagaaacgytttctcaggtaatctatcttttcacaacatacgtactagctagtttgctgaagtaa

SEQ ID NO: 4446 - DNA, 201 bp, Homo sapiens
ggattcctcttaagaatgcgcatgatgcagacgtaggtgagaacgcccttcagaagtacgcactcaacccaaatgaccacttctccctggacgtgcgaagrggagctgatgggaacaagtacccagaactggtgctggagcgctctctggaccgcgaggaagaggctgttcaccacctcgttctcgtggcttctgatgggg

SEQ ID NO: 4447 - DNA, 201 bp, Homo sapiens
tccttttacaacatcactctaaccgctaaagatggagggaacccctccctgtccacggatgctcacattttgctccaggtggcagacatcaacgacaacgyacccgccttctcccgcacatcctactccacctacattcccgaaaacaaccccagaggagcctctgtcttctcagtgacggcccatgaccccgacagcaac

SEQ ID NO: 4448 - DNA, 201 bp, Homo sapiens
aggaactggagctaaaaatcagtgaaaccactacgccaggattccggattcctcttaagaatgcgcatgatgcagacgtaggtgagaacgcccttcagaartacgcactcaacccaaatgaccacttctccctggacgtgcgaaggggagctgatgggaacaagtacccagaactggtgctggagcgctctctggaccgcg

SEQ ID NO: 4449 - DNA, 201 bp, Homo sapiens
ctggagcgctctctggaccgcgaggaagaggctgttcaccacctcgttctcgtggcttctgatgggggtgacccagtgctatctggcacctcccgcatctrcgtgaaggtcctggatgcgaacgacaatgcgcctgtttttacacagcccgagtaccgcataagcattccggagaatacgctcgtgggcacccggatactc

SEQ ID NO: 4450 - DNA, 201 bp, Homo sapiens
gagatcgacagaggctccttcgtaggcaacatcgccaaggacttgggtttggagcccctggcactggcagagcagggagtccgcatcgtctccagaggtakgtcccagctctttgctctgaacccgcgaagcggcagcttggtcactgcgaacaggatagaccgggaggagctctgcgctcagagcgcaccctgtctgttg

SEQ ID NO: 4451 - DNA, 102 bp, Homo sapiens
argggggtggaggtttggccctaaagcttcaggacaccaaagaaattcagtcgaacagcccaccagttctctccatagggacctgggtcccgtgaatgctgg

SEQ ID NO: 4452 - DNA, 201 bp, Homo sapiens; identical to SEQ ID NO: 4171

SEQ ID NO: 4453 - DNA, 201 bp, Homo sapiens; identical to SEQ ID NO: 4173

SEQ ID NO: 4454 - DNA, 201 bp, Homo sapiens
cctcggacggcagtgacttcacttttctaagacccctcagcgttcagcagcccacagctctggcgctggagcctgacgccatccggtcccgctctaatackctgcgggagcggagccagcaagccccgcccaacacggactggcgtttctctcaggcccagagacccggcaccagcggctcccaaaatggcgatgacaccg

SEQ ID NO: 4455 - DNA, 201 bp, Homo sapiens; identical to SEQ ID NO: 4106

SEQ ID NO: 4456 - DNA, 201 bp, Homo sapiens; identical to SEQ ID NO: 4175

SEQ ID NO: 4457 - DNA, 201 bp, Homo sapiens; identical to SEQ ID NO: 4176

SEQ ID NO: 4458 - DNA, 201 bp, Homo sapiens; identical to SEQ ID NO: 4177

SEQ ID NO: 4459 - DNA, 201 bp, Homo sapiens; identical to SEQ ID NO: 4178

SEQ ID NO: 4460 - DNA, 201 bp, Homo sapiens; identical to SEQ ID NO: 4179

SEQ ID NO: 4461 - DNA, 201 bp, Homo sapiens; identical to SEQ ID NO: 4180

SEQ ID NO: 4462 - DNA, 201 bp, Homo sapiens; identical to SEQ ID NO: 4185

SEQ ID NO: 4463 - DNA, 201 bp, Homo sapiens; identical to SEQ ID NO: 4172

SEQ ID NO: 4464 - DNA, 201 bp, Homo sapiens; identical to SEQ ID NO: 4103

SEQ ID NO: 4465 - DNA, 201 bp, Homo sapiens; identical to SEQ ID NO: 4105

SEQ ID NO: 4466 - DNA, 201 bp, Homo sapiens; identical to SEQ ID NO: 4181

SEQ ID NO: 4467 - DNA, 201 bp, Homo sapiens; identical to SEQ ID NO: 4182

SEQ ID NO: 4468 - DNA, 201 bp, Homo sapiens; identical to SEQ ID NO: 4110

SEQ ID NO: 4469 - DNA, 201 bp, Homo sapiens; identical to SEQ ID NO: 4183

SEQ ID NO: 4470 - DNA, 201 bp, Homo sapiens; identical to SEQ ID NO: 4111

SEQ ID NO: 4471 - DNA, 201 bp, Homo sapiens; identical to SEQ ID NO: 4184

SEQ ID NO: 4472 - DNA, 144 bp, Homo sapiens
tacaggcagtacacacaggtcaggaggaggaaaaaaaaaaaaaagaaaaagaaaaaagctctcgtgcctcttagaacctccataaccgccagattgaaaactgactgtccaagactgcctaaatcctacttctggatgactctc

SEQ ID NO: 4473 - DNA, 201 bp, Homo sapiens
agtgtgcatgaccaggactcaggagacaatggctacaccacatgtttcattcctggaaatttaccctttaaattggaaaagttagttgataattattaccrtttagtgactgaaagaacactggacagagaacttatctctgggtacaacatcacaataacagcaatagaccaaggaactccagctctatctactgaaact

SEQ ID NO: 4474 - DNA, 201 bp, Homo sapiens
tgttgaagtagaaataattgatattaatgacaacactccccaattccagttagaggaactggagtttaaaatgaatgaaataacgactccaggtaccagartctcattgccttttgggcaagaccttgatgtgggtatgaactcactccagagctaccaactcagctctaaccctcatttctccctggatgtgcaacaggg

SEQ ID NO: 4475 - DNA, 201 bp, Homo sapiens
tggagcgcgccctggacagggaggaagaggctgctcaccacctggtcctcacggcctcggatggcggcaagccgcctcgctctagcacagtgcgcatccaygtgacagtgttggatacaaatgacaatgccccggtttttcctcacccgatttaccgagtgaaagtccttgagaacatgcccccaggcacgcggctgctta

SEQ ID NO: 4476 - DNA, 201 bp, Homo sapiens
attacatttagaagtaatctgtatctcagtgcagtaactatttaggactgtaagcgccgctgttcacctactggaagacaaatgcaaccgaaaacactcasatctcacacctcacgaagacccgcagatgccacaaactaactgctggactgcagcgaaacccgacccctgtttggaggcactccaggtttccggaggatt

SEQ ID NO: 4477 - DNA, 201 bp, Homo sapiens
cctcgtggtggccgtccaggaccatggccagccccctctctccgccactgtcacgctcaccgtagccgtggctgacagcatccccgaagtcctgaccgagktgggcagtctgaagccttcggtcgacccgaacgattcgagccttacactctatctcgtggtggcagtggctgccatctcctgtgtcttcctcgcctttgt

SEQ ID NO: 4478 - DNA, 201 bp, Homo sapiens
aagacccatttatgcacagtgaagattctgagaggattctgcagcaaaacaacaatggccgctccacagagtcgccccagacgcggcgagctgatcctgckgtgcgcgctgctgggaacgctgtgggaaatcgggaggggacagattcgctactctgtgccagaagagacggacaaaggctccttcgtgggtaatatctcc

SEQ ID NO: 4479 - DNA, 138 bp, Homo sapiens
ttcatctgtacctttcaagtattcaaatagaaaaatayaaacaatgtaaataaaatagcaaaacaatgtaatatctcataaaactgcaatggtaaaagcatttatcctattgaaattccacaatttttatttgaaaat

SEQ ID NO: 4480 - DNA, 201 bp, Homo sapiens
tcctggagcacgttatccactcccagaagctgttgacccggatgtgggcgtgaactccctccagagctaccagctcagccccaatcaccacttctccctgracgtgcagactggagacaatggagccataaacccagagctggtgctggagcgcgccctggacagggaggaagaggctgctcaccacctggtcctcacggc

SEQ ID NO: 4481 - DNA, 201 bp, Homo sapiens
tagcaaaaagtctagattatgaagaatgttcattttatgaaatggaaatacaagccgaagatgtgggggcacttctggggaggaccaaattgctcatttckgtggaagatgtaaatgacaatagaccagaagtgatcattacgtctttgtttagcccagtgttagaaaattctcttcccgggacagtaattgccttcttga

SEQ ID NO: 4482 - DNA, 201 bp, Homo sapiens
ggacagggaggaagaggctgctcaccacctggtcctcacggcctcggatggcggcaagccgcctcgctctagcacagtgcgcatccacgtgacagtgttgratacaaatgacaatgccccggtttttcctcacccgatttaccgagtgaaagtccttgagaacatgcccccaggcacgcggctgcttactgtaacagccag

SEQ ID NO: 4483 - DNA, 201 bp, Homo sapiens
tccatcttttccttgactgcacacgaccccgacagccaggagaatgcccaggtcacttactctgtgaccgaggacacgctgcagggggcgcccctgtcctsgtatatctccatcaactctgacaccggtgtcctgtatgcgctgcaatctttcgactatgagcagatccgagacctgcagctactggtaacagccagcgac

SEQ ID NO: 4484 - DNA, 201 bp, Homo sapiens
ggctgtcctaccgcctgctcaaggccagcgagccgggactcttctcggtgggtctgcacacgggcgaggtgcgcacggcgcgagccctgctggacagagaygcgctcaagcagagcctcgtggtggccgtccaggaccatggccagccccctctctccgccactgtcacgctcaccgtagccgtggctgacagcatccccg

SEQ ID NO: 4485 - DNA, 201 bp, Homo sapiens
tcaccgcggactctcggaagagtcacctgatcttcccccagcccaactatgtagacatgctcatcagccaggagagctgtgagaaaaatgattctttgctracatccgtagattttcaggaatgtaaagaaaacctgccaagtattcaggtgagcccagcccttcctttatttccatgaggaatttatttgcatgatattt

SEQ ID NO: 4486 - DNA, 201 bp, Homo sapiens; identical to SEQ ID NO: 4382

SEQ ID NO: 4487 - DNA, 179 bp, Homo sapiens
gagtttaccagtttccttcagtggtgacactttaatatagaacacataggatatagtatttctttagtgaaagcctatggacaagattatgaatatgtggwctatcacattttataatttccacctactttccaatctatgttccaacctactttcttaactcatatattttatacatt

SEQ ID NO: 4488 - DNA, 201 bp, Homo sapiens; identical to SEQ ID NO: 4392

SEQ ID NO: 4489 - DNA, 201 bp, Homo sapiens; identical to SEQ ID NO: 4384

SEQ ID NO: 4490 - DNA, 167 bp, Homo sapiens; identical to SEQ ID NO: 4385

SEQ ID NO: 4491 - DNA, 201 bp, Homo sapiens
gcccttcctttatttccatgaggaatttatttgcatgatatttctctattattttgcaaaacaaatgttttgaaaatagggatttaaaaaactttatagargtaaaaatgagtttaccagtttccttcagtggtgacactttaatatagaacacataggatatagtatttctttagtgaaagcctatggacaagattatga

SEQ ID NO: 4492 - DNA, 201 bp, Homo sapiens; identical to SEQ ID NO: 4386

SEQ ID NO: 4493 - DNA, 201 bp, Homo sapiens; identical to SEQ ID NO: 4387

SEQ ID NO: 4494 - DNA, 201 bp, Homo sapiens; identical to SEQ ID NO: 4394

SEQ ID NO: 4495 - DNA, 201 bp, Homo sapiens; identical to SEQ ID NO: 4388

SEQ ID NO: 4496 - DNA, 201 bp, Homo sapiens; identical to SEQ ID NO: 4398

SEQ ID NO: 4497 - DNA, 201 bp, Homo sapiens; identical to SEQ ID NO: 4397

SEQ ID NO: 4498 - DNA, 201 bp, Homo sapiens; identical to SEQ ID NO: 4389

SEQ ID NO: 4499 - DNA, 161 bp, Homo sapiens; identical to SEQ ID NO: 4399

SEQ ID NO: 4500 - DNA, 201 bp, Homo sapiens; identical to SEQ ID NO: 4420

SEQ ID NO: 4501 - DNA, 201 bp, Homo sapiens; identical to SEQ ID NO: 4421

SEQ ID NO: 4502 - DNA, 201 bp, Homo sapiens; identical to SEQ ID NO: 4423

SEQ ID NO: 4503 - DNA, 201 bp, Homo sapiens; identical to SEQ ID NO: 4425

SEQ ID NO: 4504 - DNA, 201 bp, Homo sapiens; identical to SEQ ID NO: 4429

SEQ ID NO: 4505 - DNA, 201 bp, Homo sapiens; identical to SEQ ID NO: 4101

SEQ ID NO: 4506 - DNA, 201 bp, Homo sapiens; identical to SEQ ID NO: 4102

SEQ ID NO: 4507 - DNA, 201 bp, Homo sapiens; identical to SEQ ID NO: 4107

SEQ ID NO: 4508 - DNA, 201 bp, Homo sapiens; identical to SEQ ID NO: 4109

SEQ ID NO: 4509 - DNA, 201 bp, Homo sapiens; identical to SEQ ID NO: 4108

SEQ ID NO: 4510 - DNA, 201 bp, Homo sapiens; identical to SEQ ID NO: 4104

SEQ ID NO: 4511 - DNA, 201 bp, Homo sapiens
tacaacctatgtgttgcacatacaggaaagacggagtttaatttcctaaaatgtagtgagcaattgagttcaggacaagacatactttgtggtgattcatytggggccttatttccactttgtaattccagcgagtcgacttcccatcctgagttggtgagtttcatttatgtctattctttttcattacccacccaattt

SEQ ID NO: 4512 - DNA, 201 bp, Homo sapiens; identical to SEQ ID NO: 4123

SEQ ID NO: 4513 - DNA, 201 bp, Homo sapiens; identical to SEQ ID NO: 4122

SEQ ID NO: 4514 - DNA, 201 bp, Homo sapiens; identical to SEQ ID NO: 4113

SEQ ID NO: 4515 - DNA, 201 bp, Homo sapiens; identical to SEQ ID NO: 4114

SEQ ID NO: 4516 - DNA, 175 bp, Homo sapiens; identical to SEQ ID NO: 4115

SEQ ID NO: 4517 - DNA, 201 bp, Homo sapiens; identical to SEQ ID NO: 4125

SEQ ID NO: 4518 - DNA, 201 bp, Homo sapiens; identical to SEQ ID NO: 4116

SEQ ID NO: 4519 - DNA, 201 bp, Homo sapiens; identical to SEQ ID NO: 4126

SEQ ID NO: 4520 - DNA, 201 bp, Homo sapiens; identical to SEQ ID NO: 4128

SEQ ID NO: 4521 - DNA, 201 bp, Homo sapiens
agttctccctcaccgctgactcaaggaagagtcacctgatcttcccccagcccaactatgcagacacactcatcagccagcagagctgtgagaaaaatgascctttgtgcgtctctgttgattccaagtttcctatagaagacacccctttggttccggtgagttcattttttttctttctttcttttctttttttgtttt

SEQ ID NO: 4522 - DNA, 201 bp, Homo sapiens; identical to SEQ ID NO: 4118

SEQ ID NO: 4523 - DNA, 201 bp, Homo sapiens
ccctcaccgctgactcaaggaagagtcacctgatcttcccccagcccaactatgcagacacactcatcagccagcagagctgtgagaaaaatgagcctttstgcgtctctgttgattccaagtttcctatagaagacacccctttggttccggtgagttcattttttttctttctttcttttctttttttgttttttgttt

SEQ ID NO: 4524 - DNA, 201 bp, Homo sapiens; identical to SEQ ID NO: 4131

SEQ ID NO: 4525 - DNA, 201 bp, Homo sapiens
tcaccgctgactcaaggaagagtcacctgatcttcccccagcccaactatgcagacacactcatcagccagcagagctgtgagaaaaatgagcctttgtgygtctctgttgattccaagtttcctatagaagacacccctttggttccggtgagttcattttttttctttctttcttttctttttttgttttttgttttgt

SEQ ID NO: 4526 - DNA, 201 bp, Homo sapiens; identical to SEQ ID NO: 4121

SEQ ID NO: 4527 - DNA, 201 bp, Homo sapiens; identical to SEQ ID NO: 4134

SEQ ID NO: 4528 - DNA, 201 bp, Homo sapiens
caactacagtgaggggactttgccttattcttataatctgtgcattgcacatacgggtacaaaagagtttaatttcctaaaatgcagtgtgcccctacatkccaatgaagacatggtttgcagtgtttctcctggagccttaattccacctcatggtggggaggatttgacttcacatcctgagactctgacttcggtgag

SEQ ID NO: 4529 - DNA, 201 bp, Homo sapiens; identical to SEQ ID NO: 4138

SEQ ID NO: 4530 - DNA, 201 bp, Homo sapiens; identical to SEQ ID NO: 4139

SEQ ID NO: 4531 - DNA, 201 bp, Homo sapiens; identical to SEQ ID NO: 4140

SEQ ID NO: 4532 - DNA, 201 bp, Homo sapiens; identical to SEQ ID NO: 4141

SEQ ID NO: 4533 - DNA, 201 bp, Homo sapiens; identical to SEQ ID NO: 4143

SEQ ID NO: 4534 - DNA, 201 bp, Homo sapiens; identical to SEQ ID NO: 4142

SEQ ID NO: 4535 - DNA, 201 bp, Homo sapiens; identical to SEQ ID NO: 4145

SEQ ID NO: 4536 - DNA, 201 bp, Homo sapiens; identical to SEQ ID NO: 4144

SEQ ID NO: 4537 - DNA, 201 bp, Homo sapiens; identical to SEQ ID NO: 4375

SEQ ID NO: 4538 - DNA, 129 bp, Homo sapiens
aagattggtttttactttgaagtttgcggcatgatggtggaaagtgtaaatgctaaaacactgatgagtagaatttgatgtttattaaggttttttttttktttttttttttttttttttttactttct

SEQ ID NO: 4539 - DNA, 201 bp, Homo sapiens; identical to SEQ ID NO: 4376

SEQ ID NO: 4540 - DNA, 201 bp, Homo sapiens
ctcaccgcggactcgcgaaagagtcacctgatcttcccccagcccaattatgcggacacgctcatcagccaggagagctgtgagaaaaacgatcctttgtrtttgttagatgattcgaagtttcctatagaggataccccattggttccagtgagttttattttcatttttacttttgttaaaaaaaaaaagattggtttt

SEQ ID NO: 4541 - DNA, 135 bp, Homo sapiens
aaaaaaaagattggtttttactttgaagtttgcggcatgatggtggaaagtgtaaatgctaaaacactgatgagtagaatttgatgtttattaaggttttktttttttttttttttttttttttttttactttct

SEQ ID NO: 4542 - DNA, 201 bp, Homo sapiens
tctcaccgcggactcgcgaaagagtcacctgatcttcccccagcccaattatgcggacacgctcatcagccaggagagctgtgagaaaaacgatcctttgyctttgttagatgattcgaagtttcctatagaggataccccattggttccagtgagttttattttcatttttacttttgttaaaaaaaaaaagattggttt

SEQ ID NO: 4543 - DNA, 201 bp, Homo sapiens; identical to SEQ ID NO: 4380

SEQ ID NO: 4544 - DNA, 201 bp, Homo sapiens; identical to SEQ ID NO: 4371

SEQ ID NO: 4545 - DNA, 201 bp, Homo sapiens; identical to SEQ ID NO: 4370

SEQ ID NO: 4546 - DNA, 201 bp, Homo sapiens; identical to SEQ ID NO: 4374

SEQ ID NO: 4547 - DNA, 201 bp, Homo sapiens; identical to SEQ ID NO: 4434

SEQ ID NO: 4548 - DNA, 182 bp, Homo sapiens; identical to SEQ ID NO: 4435

SEQ ID NO: 4549 - DNA, 201 bp, Homo sapiens
tccagaatttaattttttcacatctgttgatcattgtccagccacacaagataacctcaacaaagatagcatgctactggctagcattttaactcccagcrttgaagcagataagaagattcttaaacaggtaagtatttaaaaatgtatttaatcctttttatattacaatatgccaatatattccaatatagtggtatt

SEQ ID NO: 4550 - DNA, 201 bp, Homo sapiens; identical to SEQ ID NO: 4437

SEQ ID NO: 4551 - DNA, 201 bp, Homo sapiens; identical to SEQ ID NO: 4438

SEQ ID NO: 4552 - DNA, 201 bp, Homo sapiens; identical to SEQ ID NO: 4433

SEQ ID NO: 4553 - DNA, 144 bp, Homo sapiens; identical to SEQ ID NO: 4472

SEQ ID NO: 4554 - DNA, 201 bp, Homo sapiens; identical to SEQ ID NO: 4103

SEQ ID NO: 4555 - DNA, 201 bp, Homo sapiens; identical to SEQ ID NO: 4105

SEQ ID NO: 4556 - DNA, 201 bp, Homo sapiens; identical to SEQ ID NO: 4106

SEQ ID NO: 4557 - DNA, 201 bp, Homo sapiens; identical to SEQ ID NO: 4474

SEQ ID NO: 4558 - DNA, 201 bp, Homo sapiens; identical to SEQ ID NO: 4473

SEQ ID NO: 4559 - DNA, 201 bp, Homo sapiens; identical to SEQ ID NO: 4110

SEQ ID NO: 4560 - DNA, 201 bp, Homo sapiens; identical to SEQ ID NO: 4111

SEQ ID NO: 4561 - DNA, 201 bp, Homo sapiens; identical to SEQ ID NO: 4442

SEQ ID NO: 4562 - DNA, 201 bp, Homo sapiens; identical to SEQ ID NO: 4441

SEQ ID NO: 4563 - DNA, 201 bp, Homo sapiens; identical to SEQ ID NO: 4443

SEQ ID NO: 4564 - DNA, 201 bp, Homo sapiens; identical to SEQ ID NO: 4103

SEQ ID NO: 4565 - DNA, 201 bp, Homo sapiens; identical to SEQ ID NO: 4444

SEQ ID NO: 4566 - DNA, 201 bp, Homo sapiens
gcccaactatgcggacacgctcatcagccaggagagctgtgagaaaaaggattttttatcagcgcctcaatctctactcgaagaagaaagagaagaaacgytttctcagcaagccccgcccaacacggactggcgtttctctcaggcccagagacccggcaccagcggctcccaaaatggcgatgacaccggcacctggcc

SEQ ID NO: 4567 - DNA, 201 bp, Homo sapiens; identical to SEQ ID NO: 4105

SEQ ID NO: 4568 - DNA, 201 bp, Homo sapiens; identical to SEQ ID NO: 4106

SEQ ID NO: 4569 - DNA, 201 bp, Homo sapiens; identical to SEQ ID NO: 4446

SEQ ID NO: 4570 - DNA, 201 bp, Homo sapiens; identical to SEQ ID NO: 4448

SEQ ID NO: 4571 - DNA, 201 bp, Homo sapiens; identical to SEQ ID NO: 4447

SEQ ID NO: 4572 - DNA, 201 bp, Homo sapiens; identical to SEQ ID NO: 4110

SEQ ID NO: 4573 - DNA, 201 bp, Homo sapiens; identical to SEQ ID NO: 4449

SEQ ID NO: 4574 - DNA, 201 bp, Homo sapiens; identical to SEQ ID NO: 4111

SEQ ID NO: 4575 - DNA, 102 bp, Homo sapiens; identical to SEQ ID NO: 4451

SEQ ID NO: 4576 - DNA, 201 bp, Homo sapiens; identical to SEQ ID NO: 4450

SEQ ID NO: 4577 - DNA, 201 bp, Homo sapiens; identical to SEQ ID NO: 4251

SEQ ID NO: 4578 - DNA, 201 bp, Homo sapiens; identical to SEQ ID NO: 4103

SEQ ID NO: 4579 - DNA, 201 bp, Homo sapiens; identical to SEQ ID NO: 4105

SEQ ID NO: 4580 - DNA, 201 bp, Homo sapiens; identical to SEQ ID NO: 4106

SEQ ID NO: 4581 - DNA, 201 bp, Homo sapiens; identical to SEQ ID NO: 4254

SEQ ID NO: 4582 - DNA, 201 bp, Homo sapiens; identical to SEQ ID NO: 4256

SEQ ID NO: 4583 - DNA, 201 bp, Homo sapiens; identical to SEQ ID NO: 4255

SEQ ID NO: 4584 - DNA, 177 bp, Homo sapiens; identical to SEQ ID NO: 4249

SEQ ID NO: 4585 - DNA, 201 bp, Homo sapiens; identical to SEQ ID NO: 4250

SEQ ID NO: 4586 - DNA, 201 bp, Homo sapiens; identical to SEQ ID NO: 4253

SEQ ID NO: 4587 - DNA, 201 bp, Homo sapiens; identical to SEQ ID NO: 4252

SEQ ID NO: 4588 - DNA, 201 bp, Homo sapiens; identical to SEQ ID NO: 4110

SEQ ID NO: 4589 - DNA, 201 bp, Homo sapiens; identical to SEQ ID NO: 4111

SEQ ID NO: 4590 - DNA, 201 bp, Homo sapiens; identical to SEQ ID NO: 4347

SEQ ID NO: 4591 - DNA, 201 bp, Homo sapiens; identical to SEQ ID NO: 4348

SEQ ID NO: 4592 - DNA, 201 bp, Homo sapiens; identical to SEQ ID NO: 4349

SEQ ID NO: 4593 - DNA, 201 bp, Homo sapiens; identical to SEQ ID NO: 4350

SEQ ID NO: 4594 - DNA, 201 bp, Homo sapiens; identical to SEQ ID NO: 4103

SEQ ID NO: 4595 - DNA, 201 bp, Homo sapiens; identical to SEQ ID NO: 4351

SEQ ID NO: 4596 - DNA, 201 bp, Homo sapiens; identical to SEQ ID NO: 4105

SEQ ID NO: 4597 - DNA, 201 bp, Homo sapiens; identical to SEQ ID NO: 4106

SEQ ID NO: 4598 - DNA, 201 bp, Homo sapiens; identical to SEQ ID NO: 4352

SEQ ID NO: 4599 - DNA, 201 bp, Homo sapiens; identical to SEQ ID NO: 4353

SEQ ID NO: 4600 - DNA, 201 bp, Homo sapiens; identical to SEQ ID NO: 4354

SEQ ID NO: 4601 - DNA, 201 bp, Homo sapiens; identical to SEQ ID NO: 4356

SEQ ID NO: 4602 - DNA, 201 bp, Homo sapiens; identical to SEQ ID NO: 4355

SEQ ID NO: 4603 - DNA, 201 bp, Homo sapiens; identical to SEQ ID NO: 4110

SEQ ID NO: 4604 - DNA, 201 bp, Homo sapiens; identical to SEQ ID NO: 4111

SEQ ID NO: 4605 - DNA, 201 bp, Homo sapiens; identical to SEQ ID NO: 4357

SEQ ID NO: 4606 - DNA, 201 bp, Homo sapiens; identical to SEQ ID NO: 4275

SEQ ID NO: 4607 - DNA, 201 bp, Homo sapiens; identical to SEQ ID NO: 4277

SEQ ID NO: 4608 - DNA, 201 bp, Homo sapiens; identical to SEQ ID NO: 4103

SEQ ID NO: 4609 - DNA, 201 bp, Homo sapiens; identical to SEQ ID NO: 4276

SEQ ID NO: 4610 - DNA, 201 bp, Homo sapiens; identical to SEQ ID NO: 4105

SEQ ID NO: 4611 - DNA, 201 bp, Homo sapiens; identical to SEQ ID NO: 4279

SEQ ID NO: 4612 - DNA, 201 bp, Homo sapiens; identical to SEQ ID NO: 4106

SEQ ID NO: 4613 - DNA, 201 bp, Homo sapiens; identical to SEQ ID NO: 4278

SEQ ID NO: 4614 - DNA, 201 bp, Homo sapiens; identical to SEQ ID NO: 4280

SEQ ID NO: 4615 - DNA, 201 bp, Homo sapiens; identical to SEQ ID NO: 4110

SEQ ID NO: 4616 - DNA, 201 bp, Homo sapiens; identical to SEQ ID NO: 4281

SEQ ID NO: 4617 - DNA, 201 bp, Homo sapiens; identical to SEQ ID NO: 4111

SEQ ID NO: 4618 - DNA, 201 bp, Homo sapiens; identical to SEQ ID NO: 4282

SEQ ID NO: 4619 - DNA, 201 bp, Homo sapiens; identical to SEQ ID NO: 4283

SEQ ID NO: 4620 - DNA, 201 bp, Homo sapiens; identical to SEQ ID NO: 4476

SEQ ID NO: 4621 - DNA, 201 bp, Homo sapiens; identical to SEQ ID NO: 4475

SEQ ID NO: 4622 - DNA, 201 bp, Homo sapiens; identical to SEQ ID NO: 4103

SEQ ID NO: 4623 - DNA, 201 bp, Homo sapiens; identical to SEQ ID NO: 4478

SEQ ID NO: 4624 - DNA, 138 bp, Homo sapiens; identical to SEQ ID NO: 4479

SEQ ID NO: 4625 - DNA, 201 bp, Homo sapiens; identical to SEQ ID NO: 4481

SEQ ID NO: 4626 - DNA, 201 bp, Homo sapiens; identical to SEQ ID NO: 4480

SEQ ID NO: 4627 - DNA, 201 bp, Homo sapiens; identical to SEQ ID NO: 4110

SEQ ID NO: 4628 - DNA, 201 bp, Homo sapiens; identical to SEQ ID NO: 4482

SEQ ID NO: 4629 - DNA, 201 bp, Homo sapiens; identical to SEQ ID NO: 4105

SEQ ID NO: 4630 - DNA, 201 bp, Homo sapiens; identical to SEQ ID NO: 4106

SEQ ID NO: 4631 - DNA, 201 bp, Homo sapiens; identical to SEQ ID NO: 4111

SEQ ID NO: 4632 - DNA, 201 bp, Homo sapiens; identical to SEQ ID NO: 4477

SEQ ID NO: 4633 - DNA, 201 bp, Homo sapiens; identical to SEQ ID NO: 4483

SEQ ID NO: 4634 - DNA, 201 bp, Homo sapiens; identical to SEQ ID NO: 4484

SEQ ID NO: 4635 - DNA, 201 bp, Homo sapiens
gcacctggagaactcatgccatcggcatccactgcttccgccagacaacatgtggtctagccagaggttccaggcccacctgcaggagatgggtgccccamatgcttggtccaccatcatcgtgcctggcatgaaggatgctgtgatccacgcacttcagacctcccaggacaccgtgcagtgtcggaaggccagctttga

SEQ ID NO: 4636 - DNA, 201 bp, Homo sapiens
aagtatattgagcggcccctcctcatctttggcaccaagtttgacctcagacagtggttcctggtaactgactggaacccacttaccgtgtggttctaccrcgacagctatatccgcttttccacgcagcccttctccctgaagaacctggacaactcagtgcacctgtgcaacaactccatccagaagcacctggagaac

SEQ ID NO: 4637 - DNA, 201 bp, Homo sapiens
gccttgttgcctctgccctttgaagtcggaacaattcctagcacctgtcggaaggtcaaggccaaaggcaaattcaaggccagactgtgacaaacccaggrctgaggcctgccccatgaagaggctgagccccctgaaacccctgccccttgttggtacattccagaggcgcaggggcctgggggatatgaagctagggaa

SEQ ID NO: 4638 - DNA, 201 bp, Homo sapiens
tgcaggagatgggtgccccaaatgcttggtccaccatcatcgtgcctggcatgaaggatgctgtgatccacgcacttcagacctcccaggacaccgtgcartgtcggaaggccagctttgagctctatggcgctgacttcgtgttcggggaggacttccagccctggctgattgagatcaacgccagccccacgatggcac

SEQ ID NO: 4639 - DNA, 201 bp, Homo sapiens
gagatcaacgccagccccacgatggcaccctccacagcagtcactgcccggctctgtgctggcgtgcaagctgacaccctgcgcgtggtcattgaccggakgctggaccgcaactgtgacacaggagcctttgagctcatctataagcaggctcctgctctcctgtgcctccgaggcccccagctggaagtgccttgttgc

SEQ ID NO: 4640 - DNA, 201 bp, Homo sapiens
ctgcctgggggctgaggatgacaaaaaagccttcataggagacaagcagcccaagaaacaggagaaaaacccagtgttggtgtccccagagtttgtggatsaagctctgtgtgcgtgcgaggagtaccttagcaacttggcccacatggacatcgacaaggacctggaggccccgctgtacctcacccccgagggctggtc

SEQ ID NO: 4641 - DNA, 201 bp, Homo sapiens
agggctcgtccgcttcggcttgtcctaatttggtgcccaatctgaagctgggctgtaccattgcatacctgggggaggctgtggcaaaggtgacaagaagrccgaaggcacaaagggaagctgcacccattcctggaggagcttaaatagtgactcgagtgcaagaatttaaaaataccgagacagccctaggtggaaaac

SEQ ID NO: 4642 - DNA, 201 bp, Homo sapiens
gaaacaggagaaaaacccagtgttggtgtccccagagtttgtggatgaagctctgtgtgcgtgcgaggagtaccttagcaacttggcccacatggacatcracaaggacctggaggccccgctgtacctcacccccgagggctggtccctcttcctccagcgctactaccaagtggtccacgaaggggcagaactcaggca

SEQ ID NO: 4643 - DNA, 201 bp, Homo sapiens
caaattcaaggccagactgtgacaaacccagggctgaggcctgccccatgaagaggctgagccccctgaaacccctgccccttgttggtacattccagagrcgcaggggcctgggggatatgaagctagggaagcccctgcttcgattccccactgcccttgtcctggatccaacaccaaataaaaagaaacaagtgaagt

SEQ ID NO: 4644 - DNA, 201 bp, Homo sapiens
tcctaatttggtgcccaatctgaagctgggctgtaccattgcatacctgggggaggctgtggcaaaggtgacaagaaggccgaaggcacaaagggaagctrcacccattcctggaggagcttaaatagtgactcgagtgcaagaatttaaaaataccgagacagccctaggtggaaaacttccggaaggcccaagcgttcg

SEQ ID NO: 4645 - DNA, 159 bp, Homo sapiens
gggtgggaagaaggtgggcctcgagcaaagccgctagaggtggggtgcgggtggtcggmctcaggcgagccccggggcacagcccggggcgggaggcggagcttggcggccgagatctccgcgctgcagttagccccgccgagcgccaggagctgcggg

SEQ ID NO: 4646 - DNA, 201 bp, Homo sapiens
aagaacctggacaactcagtgcacctgtgcaacaactccatccagaagcacctggagaactcatgccatcggcatccactgcttccgccagacaacatgtkgtctagccagaggttccaggcccacctgcaggagatgggtgccccaaatgcttggtccaccatcatcgtgcctggcatgaaggatgctgtgatccacgca

SEQ ID NO: 4647 - DNA, 201 bp, Homo sapiens
tcgagcaaagccgctagaggtggggtgcgggtggtcggcctcaggcgagccccggggcacagcccggggcgggaggcggagcttggcggccgagatctccscgctgcagttagccccgccgagcgccaggagctgcgggtaggaggggcgagagaaaggatgggggtacagaaccggaagaaacgaagggctcgtccgctt

SEQ ID NO: 4648 - DNA, 201 bp, Homo sapiens
gctgtgaggacatcctgcagcagctgcaggccgtggtaccccagatagacatggaaggggatcgcaacatctggatcgtgaagccaggagccaagtcccgyggacgaggcatcatgtgcatggaccacctggaggagatgctgaagctggtgaacggcaaccccgtggtgatgaaggacggcaagtgggtggtgcagaagt

SEQ ID NO: 4649 - DNA, 201 bp, Homo sapiens
taccccgctcggagcatagatggtaccgtccggaagtccgggcggagaccgtagctgcgcttctcgcgaaagggcaggcatcgcggggctggccacttccrtacttccgctttccggcccagccagcgcccgcgatgactgccactctccgcccctacctgagtgccgtgcgggccacattgcaggctgccctctgcctgg

SEQ ID NO: 4650 - DNA, 201 bp, Homo sapiens
gagatgggtgccccaaatgcttggtccaccatcatcgtgcctggcatgaaggatgctgtgatccacgcacttcagacctcccaggacaccgtgcagtgtcrgaaggccagctttgagctctatggcgctgacttcgtgttcggggaggacttccagccctggctgattgagatcaacgccagccccacgatggcaccctcc

SEQ ID NO: 4651 - DNA, 201 bp, Homo sapiens; identical to SEQ ID NO: 4636

SEQ ID NO: 4652 - DNA, 201 bp, Homo sapiens; identical to SEQ ID NO: 4635

SEQ ID NO: 4653 - DNA, 201 bp, Homo sapiens; identical to SEQ ID NO: 4638

SEQ ID NO: 4654 - DNA, 201 bp, Homo sapiens; identical to SEQ ID NO: 4637

SEQ ID NO: 4655 - DNA, 201 bp, Homo sapiens
gagatcaacgccagccccacgatggcaccctccacagcagtcactgcccggctctgtgctggcgtgcaagctgacaccctgcgcgtggtcattgaccggakgctggaccgcaactgtgacacaggagcctttgagctcatctataagcagcccgtcaccacttccccagcctccacaccaaggcccagctgccttctcccc

SEQ ID NO: 4656 - DNA, 201 bp, Homo sapiens
ttgatatgggatcgtgacaggcccctccctatgtgcaggagacaagcagcccaagaaacaggagaaaaacccagtgttggtgtccccagagtttgtggatsaagctctgtgtgcgtgcgaggagtaccttagcaacttggcccacatggacatcgacaaggacctggaggccccgctgtacctcacccccgagggctggtc

SEQ ID NO: 4657 - DNA, 201 bp, Homo sapiens
aagctggtgggcactaaggccctgtcgaccacaggcaaggccttgaggactctacccacggctaaggtcttcatttccctcccaccgaaccttgatttcarggtggcacccagcatcctgaagccaagaaaggtgggcctcgacctgtgactcacacccagtggacagtgctgagcacggggtcagggctggagggcacag

SEQ ID NO: 4658 - DNA, 201 bp, Homo sapiens; identical to SEQ ID NO: 4642

SEQ ID NO: 4659 - DNA, 201 bp, Homo sapiens; identical to SEQ ID NO: 4643

SEQ ID NO: 4660 - DNA, 201 bp, Homo sapiens; identical to SEQ ID NO: 4646

SEQ ID NO: 4661 - DNA, 201 bp, Homo sapiens; identical to SEQ ID NO: 4648

SEQ ID NO: 4662 - DNA, 201 bp, Homo sapiens; identical to SEQ ID NO: 4650

SEQ ID NO: 4663 - DNA, 201 bp, Homo sapiens; identical to SEQ ID NO: 4635

SEQ ID NO: 4664 - DNA, 201 bp, Homo sapiens; identical to SEQ ID NO: 4636

SEQ ID NO: 4665 - DNA, 201 bp, Homo sapiens; identical to SEQ ID NO: 4637

SEQ ID NO: 4666 - DNA, 201 bp, Homo sapiens
gctctgtgctggcgtgcaagctgacaccctgcgcgtggtcattgaccggatgctggaccgcaactgtgacacaggagcctttgagctcatctataagcagmctgctgtggaggtgcctcaatatgtgggcatccggctcctggtagagggcttcaccatcaagaagcccatggcgatgtgtcatcggcggatgggggtccg

SEQ ID NO: 4667 - DNA, 201 bp, Homo sapiens
gtcataccctattcaggcagtagaggaagaggcctcaggagacaagcagcccaagaaacaggagaaaaacccagtgttggtgtccccagagtttgtggatsaagctctgtgtgcgtgcgaggagtaccttagcaacttggcccacatggacatcgacaaggacctggaggccccgctgtacctcacccccgagggctggtc

SEQ ID NO: 4668 - DNA, 201 bp, Homo sapiens; identical to SEQ ID NO: 4657

SEQ ID NO: 4669 - DNA, 201 bp, Homo sapiens; identical to SEQ ID NO: 4641

SEQ ID NO: 4670 - DNA, 201 bp, Homo sapiens; identical to SEQ ID NO: 4642

SEQ ID NO: 4671 - DNA, 162 bp, Homo sapiens
tctacagaaaattagctgggtgtggtggcacacacctgtagtcctagctactcgggaggcctaggtgggaggattacctgagcctgggaagatcaaaactrtggtgagctgtgatcacgccactgcgctctgagcctgggagacagagtgaaaccctaaatc

SEQ ID NO: 4672 - DNA, 201 bp, Homo sapiens; identical to SEQ ID NO: 4643

SEQ ID NO: 4673 - DNA, 201 bp, Homo sapiens
gagggtcaagagtggatggggcgaggccgtgtaccccagggtccacagcaagagcctgaggccatcagcagctcctccgtgcagcgaggcccagaattccsacctaaggacagacatggggcttcctatttagggactcccccagcatctccgatccaggggtggggagcgtgagccttcactttacagatgaagaaactg

SEQ ID NO: 4674 - DNA, 201 bp, Homo sapiens
gtggcagtgagtcgacgcagggacatattgccagaactgccgagcactgggagccccccaaccccagagaacaagccaagctagcagaatgacacctaccrggcataggaacgttaatgccatgagacaggggaaggaattggccttgcctaaacctcagcccttctgcagagggcatgggtctatcccttcttcagcaag

SEQ ID NO: 4675 - DNA, 159 bp, Homo sapiens; identical to SEQ ID NO: 4645

SEQ ID NO: 4676 - DNA, 201 bp, Homo sapiens
gccagaactgccgagcactgggagccccccaaccccagagaacaagccaagctagcagaatgacacctaccgggcataggaacgttaatgccatgagacargggaaggaattggccttgcctaaacctcagcccttctgcagagggcatgggtctatcccttcttcagcaaggggccaaggtcacctaaaaatgaaacatc

SEQ ID NO: 4677 - DNA, 201 bp, Homo sapiens; identical to SEQ ID NO: 4647

SEQ ID NO: 4678 - DNA, 201 bp, Homo sapiens
tggtcccctgaaaagagatgtctacttggaccctgtgaatgtgaccttatgtgggaaaagagtctttgtagctgggtatggtggctcacacctgttatccyagcactttgagaggccaaggcaggagatcgcttgagcccgcaagttcaagaccagtctgggcaacatggtgaaaccgtttctacagaaaattagctgggt

SEQ ID NO: 4679 - DNA, 201 bp, Homo sapiens; identical to SEQ ID NO: 4649

SEQ ID NO: 4680 - DNA, 201 bp, Homo sapiens
gtgaccttatgtgggaaaagagtctttgtagctgggtatggtggctcacacctgttatcccagcactttgagaggccaaggcaggagatcgcttgagcccrcaagttcaagaccagtctgggcaacatggtgaaaccgtttctacagaaaattagctgggtgtggtggcacacacctgtagtcctagctactcgggaggcc

SEQ ID NO: 4681 - DNA, 201 bp, Homo sapiens; identical to SEQ ID NO: 4638

SEQ ID NO: 4682 - DNA, 201 bp, Homo sapiens
gagatcaacgccagccccacgatggcaccctccacagcagtcactgcccggctctgtgctggcgtgcaagctgacaccctgcgcgtggtcattgaccggakgctggaccgcaactgtgacacaggagcctttgagctcatctataagcagcctgctgtggaggtgcctcaatatgtgggcatccggctcctggtagagggc

SEQ ID NO: 4683 - DNA, 201 bp, Homo sapiens
ggcaggagatcgcttgagcccgcaagttcaagaccagtctgggcaacatggtgaaaccgtttctacagaaaattagctgggtgtggtggcacacacctgtrgtcctagctactcgggaggcctaggtgggaggattacctgagcctgggaagatcaaaactgtggtgagctgtgatcacgccactgcgctctgagcctggg

SEQ ID NO: 4684 - DNA, 201 bp, Homo sapiens; identical to SEQ ID NO: 4644

SEQ ID NO: 4685 - DNA, 201 bp, Homo sapiens; identical to SEQ ID NO: 4646

SEQ ID NO: 4686 - DNA, 201 bp, Homo sapiens; identical to SEQ ID NO: 4648

SEQ ID NO: 4687 - DNA, 201 bp, Homo sapiens
atgtgggcatccggctcctggtagagggcttcaccatcaagaagcccatggcgatgtgtcatcggcggatgggggtccgcccagcagtccctctgctgacycagcgaggctctggggaagcccgtcaccacttccccagcctccacaccaaggcccagctgccttctccccatgtactccgacaccagggccaggtcctca

SEQ ID NO: 4688 - DNA, 201 bp, Homo sapiens; identical to SEQ ID NO: 4650

SEQ ID NO: 4689 - DNA, 201 bp, Homo sapiens
agccttcatagaggacttctggctgactgctgcccgcaacgttctcaagctggtggtgaagtctgagtggaagtcataccctattcaggcagtagaggaaraggcctcaggagacaagcagcccaagaaacaggagaaaaacccagtgttggtgtccccagagtttgtggatgaagctctgtgtgcgtgcgaggagtacct

SEQ ID NO: 4690 - DNA, 201 bp, Homo sapiens; identical to SEQ ID NO: 4635

SEQ ID NO: 4691 - DNA, 201 bp, Homo sapiens; identical to SEQ ID NO: 4636

SEQ ID NO: 4692 - DNA, 201 bp, Homo sapiens; identical to SEQ ID NO: 4637

SEQ ID NO: 4693 - DNA, 201 bp, Homo sapiens; identical to SEQ ID NO: 4666

SEQ ID NO: 4694 - DNA, 201 bp, Homo sapiens; identical to SEQ ID NO: 4667

SEQ ID NO: 4695 - DNA, 201 bp, Homo sapiens; identical to SEQ ID NO: 4657

SEQ ID NO: 4696 - DNA, 201 bp, Homo sapiens; identical to SEQ ID NO: 4642

SEQ ID NO: 4697 - DNA, 162 bp, Homo sapiens; identical to SEQ ID NO: 4671

SEQ ID NO: 4698 - DNA, 201 bp, Homo sapiens; identical to SEQ ID NO: 4643

SEQ ID NO: 4699 - DNA, 201 bp, Homo sapiens; identical to SEQ ID NO: 4673

SEQ ID NO: 4700 - DNA, 201 bp, Homo sapiens; identical to SEQ ID NO: 4674

SEQ ID NO: 4701 - DNA, 201 bp, Homo sapiens; identical to SEQ ID NO: 4676

SEQ ID NO: 4702 - DNA, 201 bp, Homo sapiens; identical to SEQ ID NO: 4678

SEQ ID NO: 4703 - DNA, 201 bp, Homo sapiens; identical to SEQ ID NO: 4680

SEQ ID NO: 4704 - DNA, 201 bp, Homo sapiens; identical to SEQ ID NO: 4638

SEQ ID NO: 4705 - DNA, 201 bp, Homo sapiens; identical to SEQ ID NO: 4682

SEQ ID NO: 4706 - DNA, 201 bp, Homo sapiens; identical to SEQ ID NO: 4683

SEQ ID NO: 4707 - DNA, 201 bp, Homo sapiens; identical to SEQ ID NO: 4646

SEQ ID NO: 4708 - DNA, 201 bp, Homo sapiens; identical to SEQ ID NO: 4648

SEQ ID NO: 4709 - DNA, 201 bp, Homo sapiens; identical to SEQ ID NO: 4687

SEQ ID NO: 4710 - DNA, 201 bp, Homo sapiens
cctgggagcagaggacttctggctgactgctgcccgcaacgttctcaagctggtggtgaagtctgagtggaagtcataccctattcaggcagtagaggaaraggcctcaggagacaagcagcccaagaaacaggagaaaaacccagtgttggtgtccccagagtttgtggatgaagctctgtgtgcgtgcgaggagtacct

SEQ ID NO: 4711 - DNA, 201 bp, Homo sapiens; identical to SEQ ID NO: 4650

SEQ ID NO: 4712 - DNA, 201 bp, Homo sapiens
ccagaggtggcgaggtgagtcctccagagcttcctggccgggccctcctcctgcctgttctggctcctctgctcccacgctagctgtcccttttctgattytggtggatcctccctcccctaattaaagtctctttttgcccctttggggctgcatgaggtctatgctgtgtgtgtgtgtgaaaggaggggaggtggggct

SEQ ID NO: 4713 - DNA, 201 bp, Homo sapiens
cagcttcctgagttctgcctaaagatggccccccagcactggttggggacaagggccaaattggtgaccaccagtcatgcctaggacctggggcccaaaarccgggcaacctctggctacaggggccattgggtgccctcccagttgagaggggccgctgtttcgccttgtccgtcagtgccagtgcctgtgccagaggtg

SEQ ID NO: 4714 - DNA, 201 bp, Homo sapiens
cctccacctccagtggctgtgactggtcccagtgattatacgttattggttgctgtgggtctgggcgggcctggagccagaaggcgacttattttttctcycctatgccaccccaggtggggagggagggaggtttcagactccagtttctcccttgcccttttattcccaagcctccttggccccagtataagtgttggg

SEQ ID NO: 4715 - DNA, 201 bp, Homo sapiens
gccattgggtgccctcccagttgagaggggccgctgtttcgccttgtccgtcagtgccagtgcctgtgccagaggtggcgaggtgagtcctccagagcttyctggccgggccctcctcctgcctgttctggctcctctgctcccacgctagctgtcccttttctgattctggtggatcctccctcccctaattaaagtctc

SEQ ID NO: 4716 - DNA, 201 bp, Homo sapiens; identical to SEQ ID NO: 4641

SEQ ID NO: 4717 - DNA, 201 bp, Homo sapiens
cctgtgccagaggtggcgaggtgagtcctccagagcttcctggccgggccctcctcctgcctgttctggctcctctgctcccacgctagctgtcccttttytgattctggtggatcctccctcccctaattaaagtctctttttgcccctttggggctgcatgaggtctatgctgtgtgtgtgtgtgaaaggaggggaggt

SEQ ID NO: 4718 - DNA, 201 bp, Homo sapiens
caaaagccgggcaacctctggctacaggggccattgggtgccctcccagttgagaggggccgctgtttcgccttgtccgtcagtgccagtgcctgtgccaraggtggcgaggtgagtcctccagagcttcctggccgggccctcctcctgcctgttctggctcctctgctcccacgctagctgtcccttttctgattctgg

SEQ ID NO: 4719 - DNA, 201 bp, Homo sapiens; identical to SEQ ID NO: 4644

SEQ ID NO: 4720 - DNA, 159 bp, Homo sapiens; identical to SEQ ID NO: 4645

SEQ ID NO: 4721 - DNA, 201 bp, Homo sapiens
ttctgcctaaagatggccccccagcactggttggggacaagggccaaattggtgaccaccagtcatgcctaggacctggggcccaaaagccgggcaacctytggctacaggggccattgggtgccctcccagttgagaggggccgctgtttcgccttgtccgtcagtgccagtgcctgtgccagaggtggcgaggtgagtc

SEQ ID NO: 4722 - DNA, 201 bp, Homo sapiens; identical to SEQ ID NO: 4647

SEQ ID NO: 4723 - DNA, 201 bp, Homo sapiens
tttcgccttgtccgtcagtgccagtgcctgtgccagaggtggcgaggtgagtcctccagagcttcctggccgggccctcctcctgcctgttctggctcctytgctcccacgctagctgtcccttttctgattctggtggatcctccctcccctaattaaagtctctttttgcccctttggggctgcatgaggtctatgctg

SEQ ID NO: 4724 - DNA, 201 bp, Homo sapiens; identical to SEQ ID NO: 4649

SEQ ID NO: 4725 - DNA, 201 bp, Homo sapiens
cgctgtttcgccttgtccgtcagtgccagtgcctgtgccagaggtggcgaggtgagtcctccagagcttcctggccgggccctcctcctgcctgttctggstcctctgctcccacgctagctgtcccttttctgattctggtggatcctccctcccctaattaaagtctctttttgcccctttggggctgcatgaggtcta

SEQ ID NO: 4726 - DNA, 201 bp, Homo sapiens
gggccgctgtttcgccttgtccgtcagtgccagtgcctgtgccagaggtggcgaggtgagtcctccagagcttcctggccgggccctcctcctgcctgttytggctcctctgctcccacgctagctgtcccttttctgattctggtggatcctccctcccctaattaaagtctctttttgcccctttggggctgcatgagg

SEQ ID NO: 4727 - DNA, 201 bp, Homo sapiens; identical to SEQ ID NO: 2528

SEQ ID NO: 4728 - DNA, 201 bp, Homo sapiens; identical to SEQ ID NO: 4635

SEQ ID NO: 4729 - DNA, 201 bp, Homo sapiens; identical to SEQ ID NO: 2527

SEQ ID NO: 4730 - DNA, 201 bp, Homo sapiens; identical to SEQ ID NO: 4636

SEQ ID NO: 4731 - DNA, 201 bp, Homo sapiens
caagctgacaccctgcgcgtggtcattgaccggatgctggaccgcaactgtgacacaggagcctttgagctcatctataagcagggcccagctcctaacawgcaggtgtcaccagagagaaatgcaccactgtgcccagcaccatagctctggctcagagagtttgcctgagaaagcagcagacagaaaacagaaggtgcg

SEQ ID NO: 4732 - DNA, 201 bp, Homo sapiens; identical to SEQ ID NO: 4638

SEQ ID NO: 4733 - DNA, 201 bp, Homo sapiens
gagatcaacgccagccccacgatggcaccctccacagcagtcactgcccggctctgtgctggcgtgcaagctgacaccctgcgcgtggtcattgaccggakgctggaccgcaactgtgacacaggagcctttgagctcatctataagcagggcccagctcctaacatgcaggtgtcaccagagagaaatgcaccactgtgc

SEQ ID NO: 4734 - DNA, 201 bp, Homo sapiens; identical to SEQ ID NO: 4656

SEQ ID NO: 4735 - DNA, 201 bp, Homo sapiens; identical to SEQ ID NO: 4642

SEQ ID NO: 4736 - DNA, 201 bp, Homo sapiens; identical to SEQ ID NO: 4646

SEQ ID NO: 4737 - DNA, 201 bp, Homo sapiens; identical to SEQ ID NO: 4648

SEQ ID NO: 4738 - DNA, 201 bp, Homo sapiens; identical to SEQ ID NO: 4650

SEQ ID NO: 4739 - DNA, 201 bp, Homo sapiens; identical to SEQ ID NO: 4712

SEQ ID NO: 4740 - DNA, 201 bp, Homo sapiens; identical to SEQ ID NO: 4713

SEQ ID NO: 4741 - DNA, 201 bp, Homo sapiens; identical to SEQ ID NO: 4714

SEQ ID NO: 4742 - DNA, 201 bp, Homo sapiens; identical to SEQ ID NO: 4715

SEQ ID NO: 4743 - DNA, 201 bp, Homo sapiens; identical to SEQ ID NO: 4641

SEQ ID NO: 4744 - DNA, 201 bp, Homo sapiens; identical to SEQ ID NO: 4717

SEQ ID NO: 4745 - DNA, 201 bp, Homo sapiens; identical to SEQ ID NO: 4718

SEQ ID NO: 4746 - DNA, 201 bp, Homo sapiens; identical to SEQ ID NO: 4644

SEQ ID NO: 4747 - DNA, 159 bp, Homo sapiens; identical to SEQ ID NO: 4645

SEQ ID NO: 4748 - DNA, 201 bp, Homo sapiens; identical to SEQ ID NO: 4721

SEQ ID NO: 4749 - DNA, 201 bp, Homo sapiens; identical to SEQ ID NO: 4647

SEQ ID NO: 4750 - DNA, 201 bp, Homo sapiens; identical to SEQ ID NO: 4723

SEQ ID NO: 4751 - DNA, 201 bp, Homo sapiens; identical to SEQ ID NO: 4649

SEQ ID NO: 4752 - DNA, 201 bp, Homo sapiens; identical to SEQ ID NO: 4725

SEQ ID NO: 4753 - DNA, 201 bp, Homo sapiens; identical to SEQ ID NO: 4726

SEQ ID NO: 4754 - DNA, 201 bp, Homo sapiens; identical to SEQ ID NO: 4635

SEQ ID NO: 4755 - DNA, 201 bp, Homo sapiens; identical to SEQ ID NO: 2528

SEQ ID NO: 4756 - DNA, 201 bp, Homo sapiens; identical to SEQ ID NO: 2527

SEQ ID NO: 4757 - DNA, 201 bp, Homo sapiens; identical to SEQ ID NO: 4731

SEQ ID NO: 4758 - DNA, 201 bp, Homo sapiens; identical to SEQ ID NO: 4638

SEQ ID NO: 4759 - DNA, 201 bp, Homo sapiens; identical to SEQ ID NO: 4733

SEQ ID NO: 4760 - DNA, 201 bp, Homo sapiens; identical to SEQ ID NO: 4641

SEQ ID NO: 4761 - DNA, 201 bp, Homo sapiens
tgccacaattgaatagtgcagggtggcccagggctgcttccaggacttgcctgtcctccctgagtttggatgggagagacacaagggcctggacctcagtyttctgttctctgccccagctcagtgcacctgtgcaacaactccatccagaagcacctggagaactcatgccatcggcatccactgcttccgccagacaac

SEQ ID NO: 4762 - DNA, 201 bp, Homo sapiens; identical to SEQ ID NO: 4644

SEQ ID NO: 4763 - DNA, 149 bp, Homo sapiens
aaggtgggcctcgagcaaagccgctagaggtggggtgcgggtggtcggmctcaggcgagccccggggcacagcccggggcgggaggcggagcttggcggccgagatctccgcgctgcagttagccccgccgagcgccaggagctgcggg

SEQ ID NO: 4764 - DNA, 201 bp, Homo sapiens
gttctctgccccagctcagtgcacctgtgcaacaactccatccagaagcacctggagaactcatgccatcggcatccactgcttccgccagacaacatgtkgtctagccagaggttccaggcccacctgcaggagatgggtgccccaaatgcttggtccaccatcatcgtgcctggcatgaaggatgctgtgatccacgca

SEQ ID NO: 4765 - DNA, 201 bp, Homo sapiens; identical to SEQ ID NO: 4647

SEQ ID NO: 4766 - DNA, 201 bp, Homo sapiens; identical to SEQ ID NO: 4649

SEQ ID NO: 4767 - DNA, 201 bp, Homo sapiens; identical to SEQ ID NO: 4650

SEQ ID NO: 4768 - DNA, 201 bp, Homo sapiens
ccactgaagaacttccccatgtaaccaaaaaccacctgttccacagaaactatcgaaataacacttttaaaactttactatttctgaataaaatttacatrcatttctcagaaaaaaaaatatttggaattgaggtatctaatagagaactgagttaaattattgccacttaaaaacacaaagtgatatagccactttgtg

SEQ ID NO: 4769 - DNA, 200 bp, Homo sapiens
accagcgtcgcttaacggaagaaggcgcgagtagcagcggcgcagccagggcacctgggggtgacacgagagtgggcgggcggtccagggagcccctgcwggaaaccagacgctaaagcttgcagctgtgcagctaggggagcatctgttttccacttgagagcaacccgggcacgcgagaacagcccgatttcggtgca

SEQ ID NO: 4770 - DNA, 201 bp, Homo sapiens
cccagtttcttattactaaaataaaataatgataaagatgatattcacttcaaggactttgtgttaactagggtaaaaaaattgaaaactgtagtaagttwtgcaaattagaaatgtataatattactgctttgaaagtgatggtgaaatgtagaataattggaaggataacacaaagcacttataccaggaggcttttag

SEQ ID NO: 4771 - DNA, 201 bp, Homo sapiens
ataaagtaagaattaggaaggaaaaggagaaatggatccagggtatgaagccaatagtttagttatctcaacaaatatgattgatttcatctttatgaatktgatgatctaatttaatacattcaatcaatgaagtaaaaaaaagtgcaaggacaatatgacatctgtcattctctgttgagatttgagaggtaataatac

SEQ ID NO: 4772 - DNA, 201 bp, Homo sapiens
agagtgattccagggataacatctagagataaaaaagagaactccttttcttatgatttttttcttaagagaaaaggaatttcccaaaagcccccagcaarcatgccttcacatcccatggccagaagtggctcacatgtgtaccctgagctaagcactgcagacaggaatggaatcgcctgtaggcctcagagaccacct

SEQ ID NO: 4773 - DNA, 201 bp, Homo sapiens
tttctcatcactctgcacttcaattctcaatgccctattgaacatcaggctgtagtaagatggctagagtgattccagggataacatctagagataaaaargagaactccttttcttatgatttttttcttaagagaaaaggaatttcccaaaagcccccagcaaacatgccttcacatcccatggccagaagtggctcac

SEQ ID NO: 4774 - DNA, 201 bp, Homo sapiens
ggaagtgcgatcttggcatgtgtcagaagaaatgaaaacatttggtgaagagcattaatgactgtctttacaggaaaaaagcaatcaaatagacatgattkcttgtttcagtttcatcatttcctactgtgttacctaaactttctgagccccagtttcttattactaaaataaaataatgataaagatgatattcacttc

SEQ ID NO: 4775 - DNA, 201 bp, Homo sapiens
cttagtttataacaacaaatgtgtattgttaattcccactacaagtttataacgacattgctggatgctacactccatgtctctttgtgggacccaggctyatgggacttctgttatctgcattagagagagagaagacaacaaaatatgcactggttcttgaagctttggcccagaagtaaaatatgtcttttacctgtt

SEQ ID NO: 4776 - DNA, 201 bp, Homo sapiens
tgcttgggtgatgagtgcaccaaaatctcagaactcaccactgaagaacttccccatgtaaccaaaaaccacctgttccacagaaactatcgaaataacayttttaaaactttactatttctgaataaaatttacatgcatttctcagaaaaaaaaatatttggaattgaggtatctaatagagaactgagttaaattatt

SEQ ID NO: 4777 - DNA, 201 bp, Homo sapiens
gttgagatttgagaggtaataataccaagaacgtgtggtgacctgggtcctcactgctactgtcttcctgtacctggacacttctagcaagagacttcaayttcagaacaaagaggatcccaacttgtagctgcattatacacaccccagcagcacacataagttgatttctaattattcctctttaagaaattgtttgtg

SEQ ID NO: 4778 - DNA, 201 bp, Homo sapiens
aagaattaggaaggaaaaggagaaatggatccagggtatgaagccaatagtttagttatctcaacaaatatgattgatttcatctttatgaatgtgatgayctaatttaatacattcaatcaatgaagtaaaaaaaagtgcaaggacaatatgacatctgtcattctctgttgagatttgagaggtaataataccaagaac

SEQ ID NO: 4779 - DNA, 201 bp, Homo sapiens
gtaagaattaggaaggaaaaggagaaatggatccagggtatgaagccaatagtttagttatctcaacaaatatgattgatttcatctttatgaatgtgatkatctaatttaatacattcaatcaatgaagtaaaaaaaagtgcaaggacaatatgacatctgtcattctctgttgagatttgagaggtaataataccaaga

SEQ ID NO: 4780 - DNA, 201 bp, Homo sapiens
gaacatcaggctgtagtaagatggctagagtgattccagggataacatctagagataaaaaagagaactccttttcttatgatttttttcttaagagaaamggaatttcccaaaagcccccagcaaacatgccttcacatcccatggccagaagtggctcacatgtgtaccctgagctaagcactgcagacaggaatggaa

SEQ ID NO: 4781 - DNA, 201 bp, Homo sapiens
gtgaagagcattaatgactgtctttacaggaaaaaagcaatcaaatagacatgattgcttgtttcagtttcatcatttcctactgtgttacctaaactttytgagccccagtttcttattactaaaataaaataatgataaagatgatattcacttcaaggactttgtgttaactagggtaaaaaaattgaaaactgtagt

SEQ ID NO: 4782 - DNA, 201 bp, Homo sapiens
agcaatcaaatagacatgattgcttgtttcagtttcatcatttcctactgtgttacctaaactttctgagccccagtttcttattactaaaataaaataawgataaagatgatattcacttcaaggactttgtgttaactagggtaaaaaaattgaaaactgtagtaagttatgcaaattagaaatgtataatattactgc

SEQ ID NO: 4783 - DNA, 201 bp, Homo sapiens
aaatgtgtattgttaattcccactacaagtttataacgacattgctggatgctacactccatgtctctttgtgggacccaggcttatgggacttctgttayctgcattagagagagagaagacaacaaaatatgcactggttcttgaagctttggcccagaagtaaaatatgtcttttacctgttcacattgcattgggcc

SEQ ID NO: 4784 - DNA, 201 bp, Homo sapiens
atgcatttctcagaaaaaaaaatatttggaattgaggtatctaatagagaactgagttaaattattgccacttaaaaacacaaagtgatatagccactttrtgaattaatcagtcagcagtggctaggttatgcttagtggtttataaccaaatcttagtttataacaacaaatgtgtattgttaattcccactacaagtt

SEQ ID NO: 4785 - DNA, 201 bp, Homo sapiens
aaatatgtcttttacctgttcacattgcattgggccagggcaattatcatggctgcaagtaacttcaaaaggatggggaagtgcgatcttggcatgtgtcrgaagaaatgaaaacatttggtgaagagcattaatgactgtctttacaggaaaaaagcaatcaaatagacatgattgcttgtttcagtttcatcatttcct

SEQ ID NO: 4786 - DNA, 120 bp, Homo sapiens
taactctcactttgtagtgktatatttaggatttgatgtgacacagttatttattgctgagtgagcaaacccctagcccccaagtggggactacaggcttcagtgcttcccccacactgc

SEQ ID NO: 4787 - DNA, 201 bp, Homo sapiens
tcagatcctgagatccaaggaacaccctgggtttcccaaccactctcttactgcagaggtcctaggtgctcctggatcgtgtagtctttaactgctgcccyaagggacctcaaggaataggaattctctttgttaggaggtggaatgaaagtgtccagcaaactccagccagcagcgttcgtcccttgatttagagggcta

SEQ ID NO: 4788 - DNA, 122 bp, Homo sapiens
taactctcactttgtagtggtwtatttaggatttgatgtgacacagttatttattgctgagtgagcaaacccctagcccccaagtggggactacaggcttcagtgcttcccccacactgcct

SEQ ID NO: 4789 - DNA, 128 bp, Homo sapiens
ggcgcgctgggtcttgtgggtggaaacrcgctggctgactggggtcggcgtttagttcagcgcagcgactcggggacctggagctgacgcctagacacttgtattagctttaatagaagagaaatgga

SEQ ID NO: 4790 - DNA, 201 bp, Homo sapiens
agcaaagaagaagaaaaagaagaagaagcacaagaagaagcacaaggagtgagagtataaagagtgtagggggtggttgagagtaagaaaccaggagcctygtgccttgagactcctggaaagactcaatagtgagaatatagcctcccaccccattaacttcgctcccatgggagatggcttcccctcatgcaacaggca

SEQ ID NO: 4791 - DNA, 201 bp, Homo sapiens
gactctgacagctcagactctgagagtgatacaggcaagagggcaaggcacacatcaaaagacagcaaggcagcaaagaagaagaaaaagaagaagaagcmcaagaagaagcacaaggagtgagagtataaagagtgtagggggtggttgagagtaagaaaccaggagccttgtgccttgagactcctggaaagactcaat

SEQ ID NO: 4792 - DNA, 201 bp, Homo sapiens
cctgaatgagttgttgtttccttatcactcctggtccctttgcaagtgaaccctgcagctcacccattcattcacccaacttccttcattcagcaggaggycctattaccctctccagctgccactgccagagctggattcctgtaaaggagtccaggctagagccacagagactgttgtggaggtgagttcggctgtagt

SEQ ID NO: 4793 - DNA, 201 bp, Homo sapiens
agaaaccaggagccttgtgccttgagactcctggaaagactcaatagtgagaatatagcctcccaccccattaacttcgctcccatgggagatggcttccsctcatgcaacaggcaggtttgggagttagaggtcaaaagcagctgcctgaatgagttgttgtttccttatcactcctggtccctttgcaagtgaaccctg

SEQ ID NO: 4794 - DNA, 201 bp, Homo sapiens
tgagactcctggaaagactcaatagtgagaatatagcctcccaccccattaacttcgctcccatgggagatggcttcccctcatgcaacaggcaggtttgkgagttagaggtcaaaagcagctgcctgaatgagttgttgtttccttatcactcctggtccctttgcaagtgaaccctgcagctcacccattcattcaccc

SEQ ID NO: 4795 - DNA, 201 bp, Homo sapiens
cttcaggtccttgcttaaattcctgtcactaaatggaaatgtgtttggttttaaacttactgagttatttttcctataatccttcttcctgggtaacttayagacttaaagtcactgagcctgcattagctgacaaaaacatttaatatgttaccttagaccttggagagatgcccagcagaggtacagagccaaaggcac

SEQ ID NO: 4796 - DNA, 128 bp, Homo sapiens; identical to SEQ ID NO: 4789

SEQ ID NO: 4797 - DNA, 201 bp, Homo sapiens; identical to SEQ ID NO: 4790

SEQ ID NO: 4798 - DNA, 201 bp, Homo sapiens; identical to SEQ ID NO: 4791

SEQ ID NO: 4799 - DNA, 201 bp, Homo sapiens; identical to SEQ ID NO: 4792

SEQ ID NO: 4800 - DNA, 201 bp, Homo sapiens; identical to SEQ ID NO: 4793

SEQ ID NO: 4801 - DNA, 201 bp, Homo sapiens; identical to SEQ ID NO: 4794

SEQ ID NO: 4802 - DNA, 128 bp, Homo sapiens; identical to SEQ ID NO: 4789

SEQ ID NO: 4803 - DNA, 201 bp, Homo sapiens; identical to SEQ ID NO: 4790

SEQ ID NO: 4804 - DNA, 201 bp, Homo sapiens; identical to SEQ ID NO: 4791

SEQ ID NO: 4805 - DNA, 201 bp, Homo sapiens; identical to SEQ ID NO: 4792

SEQ ID NO: 4806 - DNA, 201 bp, Homo sapiens; identical to SEQ ID NO: 4793

SEQ ID NO: 4807 - DNA, 201 bp, Homo sapiens; identical to SEQ ID NO: 4794

SEQ ID NO: 4808 - DNA, 201 bp, Homo sapiens; identical to SEQ ID NO: 4795

SEQ ID NO: 4809 - DNA, 128 bp, Homo sapiens; identical to SEQ ID NO: 4789

SEQ ID NO: 4810 - DNA, 201 bp, Homo sapiens; identical to SEQ ID NO: 4790

SEQ ID NO: 4811 - DNA, 201 bp, Homo sapiens; identical to SEQ ID NO: 4791

SEQ ID NO: 4812 - DNA, 201 bp, Homo sapiens; identical to SEQ ID NO: 4792

SEQ ID NO: 4813 - DNA, 201 bp, Homo sapiens; identical to SEQ ID NO: 4793

SEQ ID NO: 4814 - DNA, 201 bp, Homo sapiens; identical to SEQ ID NO: 4794

SEQ ID NO: 4815 - DNA, 133 bp, Homo sapiens
gtcgggggcggagccgcggggtggtgggtgtgkgtgtgtgtgtgtgtgtgtgtgtgtgtgtgtgtgtgtttggctgtgggttagttgtgccgttctgctggaacaccgtgggaaggcagtagacgcgggcagt

SEQ ID NO: 4816 - DNA, 127 bp, Homo sapiens
gtcgggggcggagccgcggggtggtgkgtgtgtgtgtgtgtgtgtgtgtgtgtgtgtgtgtgtgtgtgtttggctgtgggttagttgtgccgttctgctggaacaccgtgggaaggcagtagacgcg

SEQ ID NO: 4817 - DNA, 201 bp, Homo sapiens
gcaccagaggttcaggagagctacaggcagcagctccggtctgatatacaaaaacgactgcaggaagaccccaactacagtccccagcgcttccccaatgsccagcgggcctttgctgatgatccttagctctttgctctatggcccttcctcatcaggggaccgtttcccccctcttccttcacagtatttaagaaataa

SEQ ID NO: 4818 - DNA, 201 bp, Homo sapiens
ggcaggcctcatccgtggctccgtcttctaccaatgtcgagtcctcagctgagggggctcccccgccaggtccagctcccccgccagccaccagccacccragggtcatccggatttcccaccagagtgtggaacccgtggtcatgatgcacatgaacattcaagattctggcacacagcctggtggtgttccgagtgctc

SEQ ID NO: 4819 - DNA, 201 bp, Homo sapiens
ctatgatgggactgaggcttcaggtggtactggagcacatgcctgtaggccctgatgccattctcagatacgttcgcagggttggtgatcccccccagccrcttcctgaggagccaatggaagttcagggagcagaaagagcttcccctgagcctcagcgggagaatgcttccccagcccctggaacaacagcagaagagg

SEQ ID NO: 4820 - DNA, 201 bp, Homo sapiens
cccggatggagtgtcgaggagggccccaaccgcagcacagtcagccgcccccgcagccaccggctgtgaccccggagccagtagccttgagctctcaaacrtcagaaccagttgaaagtgaagcacctccccgggagcccatggaggcagaagaagtggaggagcgtgccccagcccagaacccggagctcactcctggcc

SEQ ID NO: 4821 - DNA, 201 bp, Homo sapiens
ggcccctgacgagccccgagagcctgagccgggacctggaggcaccagaggttcaggagagctacaggcagcagctccggtctgatatacaaaaacgactrcaggaagaccccaactacagtccccagcgcttccccaatgcccagcgggcctttgctgatgatccttagctctttgctctatggcccttcctcatcaggg

SEQ ID NO: 4822 - DNA, 201 bp, Homo sapiens
tgcccagcctccacccacccctcaaccctccatggctgatcttcagttctctcagcttctggggaacctgctagggcctgcagggccaggggctggagggyctggtgtggcttctcccaccatcactgtggcgatgcctggtgtccctgcctttctccaaggcatgactgacttcttgcaggcaacacagacagcccctcc

SEQ ID NO: 4823 - DNA, 201 bp, Homo sapiens
caacagctccaacccgggtggtgattgcccggcccactcctccacaggctcggccttcccatcctggagggcccccagtctctgggacactgcagggcgcyggtctgggtaccaatgcctcgttggcccagatggtgagcggccttgtggggcagcttcttatgcagccagtccttgtggctcaggggaccccaggtatgg

SEQ ID NO: 4824 - DNA, 131 bp, Homo sapiens
gtcgggggcggagccgcggggtggtgggtgkgtgtgtgtgtgtgtgtgtgtgtgtgtgtgtgtgtgtgtttggctgtgggttagttgtgccgttctgctggaacaccgtgggaaggcagtagacgcgggca

SEQ ID NO: 4825 - DNA, 201 bp, Homo sapiens
caaacatcagaaccagttgaaagtgaagcacctccccgggagcccatggaggcagaagaagtggaggagcgtgccccagcccagaacccggagctcactcmtggcccagccccagcgggcccaacacctgccccggaaacaaatgcacccaaccatccttcccctgcggagtatgtcgaggtgctccaggagctacagcgg

SEQ ID NO: 4826 - DNA, 134 bp, Homo sapiens
gtcgggggcggagccgcggggtggtgggtgtgtgtgtgtgtgtgtgtgtgtgtgtgtgtgtgtgtgtgtttggctgtgggttagttgtgccgttctgctggaacaccgtgggaaggcagtagacgcgggcagtc

SEQ ID NO: 4827 - DNA, 201 bp, Homo sapiens
accttgggcagctgcagtccccccagaatgggtccctattatccagcaggacattcagagccagcggaaggtgaaaccgcagccccctctgagtgatgccsacctcagtggtatgcctgccaagagacgcaagacgatgcagggtgagggcccccagctgcttctctcagaggctgtgagccgggcagctaaggcagccgg

SEQ ID NO: 4828 - DNA, 201 bp, Homo sapiens
gtaggggagagcctgcgactgctgggcaacacctttgttgcactgtctgacctgcgctgcaatctggcctgcacgcccccacgacacctgcatgtggtccrgcctatgtctcactacaccacccccatggtgctccagcaggcagccattcccatacagatcaatgtgggaaccactgtgaccatgacaggaaatgggact

SEQ ID NO: 4829 - DNA, 201 bp, Homo sapiens
atcatccggacaaacctggaatttctccaagagcagtttaatagcattgctgcgcatgtgctgcattgcacagatagtggatttggggcccggttgctggrgttgtgtaaccaaggcctgtttgaatgcctggccctaaacctgcactgcttggggggacagcagatggagcttgctgctgttatcaatggccgaattcgt

SEQ ID NO: 4830 - DNA, 201 bp, Homo sapiens
gcctcagccactcatggtgggggatccccccctggtactcgggggcctggggcctctgttcatgaccggaatgccaacagctatgtcatggttggaacctrcaatcttcctagtgacggctctgctgtggatgttcacatcaacatggaacaggccccgattcagagtgagccccgggtacggctggtgatggctcagcac

SEQ ID NO: 4831 - DNA, 201 bp, Homo sapiens
ctccacaggctcggccttcccatcctggagggcccccagtctctgggacactgcagggcgccggtctgggtaccaatgcctcgttggcccagatggtgagyggccttgtggggcagcttcttatgcagccagtccttgtggctcaggggaccccaggtatggctccaccgccagcccctgccactgcttctgccagtgctg

SEQ ID NO: 4832 - DNA, 201 bp, Homo sapiens
ggctcccgggatgaacaggatggagcttcagctgagacagaaccttgggcagctgcagtccccccagaatgggtccctattatccagcaggacattcagarccagcggaaggtgaaaccgcagccccctctgagtgatgcctacctcagtggtatgcctgccaagagacgcaagacgatgcagggtgagggcccccagctg

SEQ ID NO: 4833 - DNA, 201 bp, Homo sapiens
gctccgtcttctaccaatgtcgagtcctcagctgagggggctcccccgccaggtccagctcccccgccagccaccagccacccgagggtcatccggatttyccaccagagtgtggaacccgtggtcatgatgcacatgaacattcaagattctggcacacagcctggtggtgttccgagtgctcccactggccccctggga

SEQ ID NO: 4834 - DNA, 201 bp, Homo sapiens
aaccttcaatcttcctagtgacggctctgctgtggatgttcacatcaacatggaacaggccccgattcagagtgagccccgggtacggctggtgatggctmagcacatgatcagggatatacagaccttactatcccggatggagactctcccctaccttcagtgtcgaggagggccccaaccgcagcacagtcagccgcc

SEQ ID NO: 4835 - DNA, 201 bp, Homo sapiens
gcctcagccactcatggtgggggatccccccctggtactcgggggcctggggcctctgttcatgaccggaatgccaacagctatgtcatggttggaacctmcaatcttcctagtgacggctctgctgtggatgttcacatcaacatggaacaggccccgattcagagtgagccccgggtacggctggtgatggctcagcac

SEQ ID NO: 4836 - DNA, 201 bp, Homo sapiens
ctgcaagatgataagaagcttcaggaatacaatgttgggggaaaggttatccacctggtggaacgggctcctcctcagactcacctcccttctggggcatrttctgggacggggtctgcctcagccactcatggtgggggatccccccctggtactcgggggcctggggcctctgttcatgaccggaatgccaacagctat

SEQ ID NO: 4837 - DNA, 1 bp, Homo sapiens
s

SEQ ID NO: 4838 - DNA, 201 bp, Homo sapiens
tgctagggcctgcagggccaggggctggagggcctggtgtggcttctcccaccatcactgtggcgatgcctggtgtccctgcctttctccaaggcatgacrgacttcttgcaggcaacacagacagcccctccaccacccccacctcctccacccccaccacctgccccagagcagcagaccatgcccccaccaggctccc

SEQ ID NO: 4839 - DNA, 201 bp, Homo sapiens
tctgaaaaacaacggctcatttaccagggacgagttctgcaagatgataagaagcttcaggaatacaatgttgggggaaaggttatccacctggtggaacmggctcctcctcagactcacctcccttctggggcatcttctgggacggggtctgcctcagccactcatggtgggggatccccccctggtactcgggggcct

SEQ ID NO: 4840 - DNA, 142 bp, Homo sapiens
ccaatgcccagcgggcctttgctgatgatccttagctctttgctctatggcccttcctcatcaggggaccgtttcccccctcttccttcacagtatttaaraaataaaagtcggatttttctggctgctttctctctacatt

SEQ ID NO: 4841 - DNA, 201 bp, Homo sapiens
ggccccccccaactcccaatgcagaggcacctccccctggtcctgggcaggcctcatccgtggctccgtcttctaccaatgtcgagtcctcagctgagggrgctcccccgccaggtccagctcccccgccagccaccagccacccgagggtcatccggatttcccaccagagtgtggaacccgtggtcatgatgcacatga

SEQ ID NO: 4842 - DNA, 1 bp, Homo sapiens
r

SEQ ID NO: 4843 - DNA, 201 bp, Homo sapiens
ggagcccacacccagtaacatccggatggcaacccacacattgatcacggggctagaagagtatgtgcgggagagtttttccttggtgcaggttcagccaygtgtggacatcatccggacaaacctggaatttctccaagagcagtttaatagcattgctgcgcatgtgctgcattgcacagatagtggatttggggcccg

SEQ ID NO: 4844 - DNA, 201 bp, Homo sapiens
cctcagtggtgcagggtgtgctcagctccctgctgggctccctgggggctcgggctggcagcagtgaaagtattgctgccttcatacaacgcctcagtggytccagcaacatctttgagcctggagctgatggggcccttggattctttggggccttgctttctcttctgtgccagaacttctctatggtggacgtagtga

SEQ ID NO: 4845 - DNA, 201 bp, Homo sapiens
gagggggctcccccgccaggtccagctcccccgccagccaccagccacccgagggtcatccggatttcccaccagagtgtggaacccgtggtcatgatgcmcatgaacattcaagattctggcacacagcctggtggtgttccgagtgctcccactggccccctgggaccccctggtcatggccaaaccctgggacagcag

SEQ ID NO: 4846 - DNA, 201 bp, Homo sapiens; identical to SEQ ID NO: 4817

SEQ ID NO: 4847 - DNA, 201 bp, Homo sapiens; identical to SEQ ID NO: 4818

SEQ ID NO: 4848 - DNA, 201 bp, Homo sapiens; identical to SEQ ID NO: 4819

SEQ ID NO: 4849 - DNA, 201 bp, Homo sapiens; identical to SEQ ID NO: 4820

SEQ ID NO: 4850 - DNA, 201 bp, Homo sapiens; identical to SEQ ID NO: 4822

SEQ ID NO: 4851 - DNA, 201 bp, Homo sapiens; identical to SEQ ID NO: 4821

SEQ ID NO: 4852 - DNA, 201 bp, Homo sapiens; identical to SEQ ID NO: 4823

SEQ ID NO: 4853 - DNA, 201 bp, Homo sapiens; identical to SEQ ID NO: 4825

SEQ ID NO: 4854 - DNA, 201 bp, Homo sapiens
ccccccctggtactcgggggcctggggcctctgttcatgaccggaatgccaacagctatgtcatggttggaaccttcaatcttcctagtgacggctctgcmgtggatgttcacatcaacatggaacaggccccgattcagagtgagccccgggtacggctggtgatggctcagcacatgatcagggatatacagaccttac

SEQ ID NO: 4855 - DNA, 201 bp, Homo sapiens
aatacaatgttgggggaaaggttatccacctggtggaacgggctcctcctcagactcacctcccttctggggcatcttctgggacggggtctgcctcagcractcatggtgggggatccccccctggtactcgggggcctggggcctctgttcatgaccggaatgccaacagctatgtcatggttggaaccttcaatcttc

SEQ ID NO: 4856 - DNA, 1 bp, Homo sapiens
s

SEQ ID NO: 4857 - DNA, 201 bp, Homo sapiens
cccgctcctggggggcctgcccagcctccacccacccctcaaccctccatggctgatcttcagttctctcagcttctggggaacctgctagggcctgcagrgccaggggctggagggcctggtgtggcttctcccaccatcactgtggcgatgcctggtgtccctgcctttctccaaggcatgactgacttcttgcaggca

SEQ ID NO: 4858 - DNA, 201 bp, Homo sapiens
agggacgagttctgcaagatgataagaagcttcaggaatacaatgttgggggaaaggttatccacctggtggaacgggctcctcctcagactcacctcccmtctggggcatcttctgggacggggtctgcctcagccactcatggtgggggatccccccctggtactcgggggcctggggcctctgttcatgaccggaatg

SEQ ID NO: 4859 - DNA, 119 bp, Homo sapiens
gatgatccttagctctttgctctatggcccttcctcatcaggggaccgtttcccccctcttccttcacagtatttaagaaataaaagtcggatttttctgrctgctttctctctacatt

SEQ ID NO: 4860 - DNA, 201 bp, Homo sapiens
gaggcacctccccctggtcctgggcaggcctcatccgtggctccgtcttctaccaatgtcgagtcctcagctgagggggctcccccgccaggtccagctcrcccgccagccaccagccacccgagggtcatccggatttcccaccagagtgtggaacccgtggtcatgatgcacatgaacattcaagattctggcacacag

SEQ ID NO: 4861 - DNA, 1 bp, Homo sapiens
r

SEQ ID NO: 4862 - DNA, 201 bp, Homo sapiens
ggatggcaacccacacattgatcacggggctagaagagtatgtgcgggagagtttttccttggtgcaggttcagccaggtgtggacatcatccggacaaayctggaatttctccaagagcagtttaatagcattgctgcgcatgtgctgcattgcacagatagtggatttggggcccggttgctggagttgtgtaaccaag

SEQ ID NO: 4863 - DNA, 201 bp, Homo sapiens
agctccctgctgggctccctgggggctcgggctggcagcagtgaaagtattgctgccttcatacaacgcctcagtggatccagcaacatctttgagcctgyagctgatggggcccttggattctttggggccttgctttctcttctgtgccagaacttctctatggtggacgtagtgatgcttctccatgggcatttccag

SEQ ID NO: 4864 - DNA, 201 bp, Homo sapiens
agctcccccgccagccaccagccacccgagggtcatccggatttcccaccagagtgtggaacccgtggtcatgatgcacatgaacattcaagattctggcmcacagcctggtggtgttccgagtgctcccactggccccctgggaccccctggtcatggccaaaccctgggctccaccctcatccagctgccctccctgcc

SEQ ID NO: 4865 - DNA, 201 bp, Homo sapiens
ctcagactcacctcccttctggggcatcttctgggacggggtctgcctcagccactcatggtgggggatccccccctggtactcgggggcctggggcctcmgttcatgaccggaatgccaacagctatgtcatggttggaaccttcaatcttcctagtgacggctctgctgtggatgttcacatcaacatggaacaggccc

SEQ ID NO: 4866 - DNA, 201 bp, Homo sapiens
gcatcccatctgaaaaacaacggctcatttaccagggacgagttctgcaagatgataagaagcttcaggaatacaatgttgggggaaaggttatccacctrgtggaacgggctcctcctcagactcacctcccttctggggcatcttctgggacggggtctgcctcagccactcatggtgggggatccccccctggtactc

SEQ ID NO: 4867 - DNA, 1 bp, Homo sapiens
s

SEQ ID NO: 4868 - DNA, 201 bp, Homo sapiens
cctgcccagcctccacccacccctcaaccctccatggctgatcttcagttctctcagcttctggggaacctgctagggcctgcagggccaggggctggagrgcctggtgtggcttctcccaccatcactgtggcgatgcctggtgtccctgcctttctccaaggcatgactgacttcttgcaggcaacacagacagcccct

SEQ ID NO: 4869 - DNA, 201 bp, Homo sapiens
taaaagagtttaaggagcacattgctgcctctgtcagcatcccatctgaaaaacaacggctcatttaccagggacgagttctgcaagatgataagaagctmcaggaatacaatgttgggggaaaggttatccacctggtggaacgggctcctcctcagactcacctcccttctggggcatcttctgggacggggtctgcct

SEQ ID NO: 4870 - DNA, 201 bp, Homo sapiens
aggcagcagctccggtctgatatacaaaaacgactgcaggaagaccccaactacagtccccagcgcttccccaatgcccagcgggcctttgctgatgatcrttagctctttgctctatggcccttcctcatcaggggaccgtttcccccctcttccttcacagtatttaagaaataaaagtcggatttttctggctgcttt

SEQ ID NO: 4871 - DNA, 201 bp, Homo sapiens
ctccagcaggcagccattcccatacagatcaatgtgggaaccactgtgaccatgacaggaaatgggactcggccccccccaactcccaatgcagaggcacrtccccctggtcctgggcaggcctcatccgtggctccgtcttctaccaatgtcgagtcctcagctgagggggctcccccgccaggtccagctcccccgcca

SEQ ID NO: 4872 - DNA, 1 bp, Homo sapiens
r

SEQ ID NO: 4873 - DNA, 201 bp, Homo sapiens
atttccagccactacaacggctccagccccagctgcgatccttcttccaccagcactacctgggtggtcaggagcccacacccagtaacatccggatggcyacccacacattgatcacggggctagaagagtatgtgcgggagagtttttccttggtgcaggttcagccaggtgtggacatcatccggacaaacctggaat

SEQ ID NO: 4874 - DNA, 201 bp, Homo sapiens
ggctccccttctggtggcgcagggagtcctggaggcctgggtcttgagagcctgtcaccggagttttttacctcagtggtgcagggtgtgctcagctcccygctgggctccctgggggctcgggctggcagcagtgaaagtattgctgccttcatacaacgcctcagtggatccagcaacatctttgagcctggagctgat

SEQ ID NO: 4875 - DNA, 201 bp, Homo sapiens
ggcacctccccctggtcctgggcaggcctcatccgtggctccgtcttctaccaatgtcgagtcctcagctgagggggctcccccgccaggtccagctcccmcgccagccaccagccacccgagggtcatccggatttcccaccagagtgtggaacccgtggtcatgatgcacatgaacattcaagattctggcacacagcc

SEQ ID NO: 4876 - DNA, 201 bp, Homo sapiens
ttggtgaagaccttggactctcaaactcgtacctttattgtgggggcccagatgaatgtaaaagagtttaaggagcacattgctgcctctgtcagcatccwatctgaaaaacaacggctcatttaccagggacgagttctgcaagatgataagaagcttcaggaatacaatgttgggggaaaggttatccacctggtggaa

SEQ ID NO: 4877 - DNA, 174 bp, Homo sapiens
  misc_feature (74)..(74): n is a, c, g, or t
tagtgcgacgcacgcaggcgtagtacggtcccccgggcgacagcggtggcggctcctcggggtgctcggctccntcccacctaggccggccccggcccgactcgccctcagaaactcactgtttggggctgcggactttctcgtcgtgccccacaaaagtaaagcttggggacc

SEQ ID NO: 4878 - DNA, 1 bp, Homo sapiens
s

SEQ ID NO: 4879 - DNA, 201 bp, Homo sapiens
gctccaacccgggtggtgattgcccggcccactcctccacaggctcggccttcccatcctggagggcccccagtctctgggacactgcagggcgccggtcrgggtaccaatgcctcgttggcccagatggtgagcggccttgtggggcagcttcttatgcagccagtccttgtggctcaggggaccccaggtatggctcca

SEQ ID NO: 4880 - DNA, 201 bp, Homo sapiens
gagacagaaccttgggcagctgcagtccccccagaatgggtccctattatccagcaggacattcagagccagcggaaggtgaaaccgcagccccctctgartgatgcctacctcagtggtatgcctgccaagagacgcaagacgatgcagggtgagggcccccagctgcttctctcagaggctgtgagccgggcagctaag

SEQ ID NO: 4881 - DNA, 201 bp, Homo sapiens
acattgctgcctctgtcagcatcccatctgaaaaacaacggctcatttaccagggacgagttctgcaagatgataagaagcttcaggaatacaatgttggyggaaaggttatccacctggtggaacgggctcctcctcagactcacctcccttctggggcatcttctgggacggggtctgcctcagccactcatggtgggg

SEQ ID NO: 4882 - DNA, 201 bp, Homo sapiens
gtcgaggtgctccaggagctacagcggctggagagtcgcctccagcccttcttgcagcgctactacgaggttctgggtgctgctgccaccacggactacartaacaatcacgagggccgggaggaggatcagcggttgatcaacttggtaggggagagcctgcgactgctgggcaacacctttgttgcactgtctgacctg

SEQ ID NO: 4883 - DNA, 9 bp, Homo sapiens
tctacattr

SEQ ID NO: 4884 - DNA, 201 bp, Homo sapiens
cttctggtggcgcagggagtcctggaggcctgggtcttgagagcctgtcaccggagttttttacctcagtggtgcagggtgtgctcagctccctgctgggytccctgggggctcgggctggcagcagtgaaagtattgctgccttcatacaacgcctcagtggatccagcaacatctttgagcctggagctgatggggccc

SEQ ID NO: 4885 - DNA, 201 bp, Homo sapiens
cccgctcctggggggcctgcccagcctccacccacccctcaaccctccatggctgatcttcagttctctcagcttctggggaacctgctagggcctgcagygccaggggctggagggcctggtgtggcttctcccaccatcactgtggcgatgcctggtgtccctgcctttctccaaggcatgactgacttcttgcaggca

SEQ ID NO: 4886 - DNA, 201 bp, Homo sapiens
ctacaataacaatcacgagggccgggaggaggatcagcggttgatcaacttggtaggggagagcctgcgactgctgggcaacacctttgttgcactgtctmacctgcgctgcaatctggcctgcacgcccccacgacacctgcatgtggtccggcctatgtctcactacaccacccccatggtgctccagcaggcagccat

SEQ ID NO: 4887 - DNA, 201 bp, Homo sapiens
tctccagggctcctgatttctcttcagcctgacgctcttttcagttaacggcaaggcggtgcacccaagtccggtggtgtcctacctggtgacctcctacytgtgctgggacgccagcgacttgatgctgcactccggagccgtgtcctacctaagcccagtgggcatgtgaagcagagggcagcccttgaatgcgcggcg

SEQ ID NO: 4888 - DNA, 201 bp, Homo sapiens
aagcagagggcagcccttgaatgcgcggcggctgagctaccgcgggtgggccgtgcagcagggcgcagcgaggcggacatccaaacagcggaactcagacrctgactccgagcgcaccccgggccttcccatttcatacaccctcgaggatgagacccaagcacctccaaggaatagcacccgaggtcttcaggacaccga

SEQ ID NO: 4889 - DNA, 201 bp, Homo sapiens
gggtgggccgtgcagcagggcgcagcgaggcggacatccaaacagcggaactcagacgctgactccgagcgcaccccgggccttcccatttcatacacccwcgaggatgagacccaagcacctccaaggaatagcacccgaggtcttcaggacaccgaccggtagccatggccagatgcccggccaaccccttcagcgtgg

SEQ ID NO: 4890 - DNA, 201 bp, Homo sapiens
tcaggacaccgaccggtagccatggccagatgcccggccaaccccttcagcgtggccacgccctggatattcgacctcccctgaggccccaccccctgatrtcaggccacgccctccgaggggaccggtggcaaactccagccctcgctctagggcccgccctttgcggctttgtccctgcccactgggtcctcacagtgc

SEQ ID NO: 4891 - DNA, 201 bp, Homo sapiens
tatcaggccacgccctccgaggggaccggtggcaaactccagccctcgctctagggcccgccctttgcggctttgtccctgcccactgggtcctcacagtrcctccaccccagaggcccagcatcccctcccgttctgcagacacttgtccagcgtcccgctgagctcggcagtgtggctagtttgtgtggccctgcccct

SEQ ID NO: 4892 - DNA, 160 bp, Homo sapiens
tgtgggatgtctctctcccccactctctgtttccctttctttttttgtcccctctctccrgggctcctgatttctcttcagcctgacgctcttttcagttaacggcaaggcggtgcacccaagtccggtggtgtcctacctggtgacctcctacctgtgc

SEQ ID NO: 4893 - DNA, 201 bp, Homo sapiens
gggcagtctcctcagtaatctaggattcaatgacaggaagtgaataagaagataacagtgtttcaaatgccgtgaaacatggcatcatgctctaacttcartataccaataaaacaatcagcttgcaatttctgctggtggtgtctctttctgagtgtttgggactctagaatctgagacccatgttcacattgtaagaat

SEQ ID NO: 4894 - DNA, 201 bp, Homo sapiens
gtaatctaggattcaatgacaggaagtgaataagaagataacagtgtttcaaatgccgtgaaacatggcatcatgctctaacttcagtataccaataaaayaatcagcttgcaatttctgctggtggtgtctctttctgagtgtttgggactctagaatctgagacccatgttcacattgtaagaatatccaggacccctt

SEQ ID NO: 4895 - DNA, 201 bp, Homo sapiens
ggagagccccttgcagaagacgccgtacgagtttctccagcatttggctctaggtgccaagggcacatgtgacaagaaggtgccagctttataaaccttgkaacttcttctgtgtcagttctgagacatacaatttactaaaacacatcatgaaggcctgttttgaagagaaggggaataagactgcatctgttcatatga

SEQ ID NO: 4896 - DNA, 201 bp, Homo sapiens
ttctccagcatttggctctaggtgccaagggcacatgtgacaagaaggtgccagctttataaaccttgtaacttcttctgtgtcagttctgagacatacartttactaaaacacatcatgaaggcctgttttgaagagaaggggaataagactgcatctgttcatatgaggttctccagcatttggctcaaggccccaagg

SEQ ID NO: 4897 - DNA, 201 bp, Homo sapiens
catacaatttactaaaacacatcatgaaggcctgttttgaagagaaggggaataagactgcatctgttcatatgaggttctccagcatttggctcaaggcyccaagggcacatgtgacaagaaggcgccggctttttaaacattggaagttcttctgtgtcagttctgtgacagaacatttacttaacacatcatgaaggc

SEQ ID NO: 4898 - DNA, 147 bp, Homo sapiens
aacggaccctgggagtcggccatcatgctggccccggaggccgttakcttagtcatggctctaaatatgtacctgcaatcggatgttgaggatcaccgagcccgcgacgtagaagtacgggaagttcatgcgcagctgccaggccag

SEQ ID NO: 4899 - DNA, 201 bp, Homo sapiens
aagggggccgcccacaaggacctccacaggggcagtctcctcagtaatctaggattcaatgacaggaagtgaataagaagataacagtgtttcaaatgccktgaaacatggcatcatgctctaacttcagtataccaataaaacaatcagcttgcaatttctgctggtggtgtctctttctgagtgtttgggactctagaa

SEQ ID NO: 4900 - DNA, 201 bp, Homo sapiens
gcctgttttgaagagaaggggaataagactgcatctgttcatatgaggttctccagcatttggctcaaggccccaagggcacatgtgacaagaaggcgccrgctttttaaacattggaagttcttctgtgtcagttctgtgacagaacatttacttaacacatcatgaaggctagtttggatgtggaggggaatagactcc

SEQ ID NO: 4901 - DNA, 201 bp, Homo sapiens; identical to SEQ ID NO: 4893

SEQ ID NO: 4902 - DNA, 201 bp, Homo sapiens; identical to SEQ ID NO: 4894

SEQ ID NO: 4903 - DNA, 201 bp, Homo sapiens
catgcgcagctgccaggccagctcgaagaaggcgagcagggtgcgggagagccccttgcagaagacgccgtacgaggttctccagcatttggctcaaggcyccaagggcacatgtgacaagaaggcgccggctttttaaacattggaagttcttctgtgtcagttctgtgacagaacatttacttaacacatcatgaaggc

SEQ ID NO: 4904 - DNA, 147 bp, Homo sapiens; identical to SEQ ID NO: 4898

SEQ ID NO: 4905 - DNA, 201 bp, Homo sapiens; identical to SEQ ID NO: 4899

SEQ ID NO: 4906 - DNA, 201 bp, Homo sapiens
aggcgagcagggtgcgggagagccccttgcagaagacgccgtacgaggttctccagcatttggctcaaggccccaagggcacatgtgacaagaaggcgccrgctttttaaacattggaagttcttctgtgtcagttctgtgacagaacatttacttaacacatcatgaaggctagtttggatgtggaggggaatagactcc

SEQ ID NO: 4907 - DNA, 201 bp, Homo sapiens; identical to SEQ ID NO: 4893

SEQ ID NO: 4908 - DNA, 201 bp, Homo sapiens; identical to SEQ ID NO: 4894

SEQ ID NO: 4909 - DNA, 201 bp, Homo sapiens; identical to SEQ ID NO: 4895

SEQ ID NO: 4910 - DNA, 201 bp, Homo sapiens; identical to SEQ ID NO: 4896

SEQ ID NO: 4911 - DNA, 201 bp, Homo sapiens; identical to SEQ ID NO: 4897

SEQ ID NO: 4912 - DNA, 147 bp, Homo sapiens; identical to SEQ ID NO: 4898

SEQ ID NO: 4913 - DNA, 201 bp, Homo sapiens; identical to SEQ ID NO: 4899

SEQ ID NO: 4914 - DNA, 201 bp, Homo sapiens; identical to SEQ ID NO: 4900

SEQ ID NO: 4915 - DNA, 201 bp, Homo sapiens; identical to SEQ ID NO: 4893

SEQ ID NO: 4916 - DNA, 201 bp, Homo sapiens; identical to SEQ ID NO: 4894

SEQ ID NO: 4917 - DNA, 201 bp, Homo sapiens; identical to SEQ ID NO: 4903

SEQ ID NO: 4918 - DNA, 147 bp, Homo sapiens; identical to SEQ ID NO: 4898

SEQ ID NO: 4919 - DNA, 201 bp, Homo sapiens; identical to SEQ ID NO: 4899

SEQ ID NO: 4920 - DNA, 201 bp, Homo sapiens; identical to SEQ ID NO: 4906

SEQ ID NO: 4921 - DNA, 201 bp, Homo sapiens
acatctcaagaagatgcagctccatggcaaaggatctcaagatcccagtaccaaggtccacataaaagttttgcaaactgtgatctccttcttcttgttaygtgccatttactttgtgtctgtaataatatcagtttggagttttaagaatctggaaaacaaacctgtcttcatgttctgccaagctattggattcagctg

SEQ ID NO: 4922 - DNA, 201 bp, Homo sapiens
tgctactagcctcagcatattttatttgctcaagattgccaatttctccaaccttatttttcttcgcttaaagaggagagttaagagtgtcattctggtgrtgctgttggggcctttgctatttttggcttgtcatctttttgtggtaaacatgaatcagattgtatggacaaaagaatatgaaggaaacatgacttggaa

SEQ ID NO: 4923 - DNA, 201 bp, Homo sapiens
tttgctgaccaaattgtcactgctctggcggtctccagagttggtttgctctgggtgttattattaaattggtattcaactgtgttgaatccagctttttrtagtgtagaattaagaactactgcttataatatctgggcagtaaccggccatttcagcaactggcctgctactagcctcagcatattttatttgctcaag

SEQ ID NO: 4924 - DNA, 101 bp, Homo sapiens
ttggattcagctgttcttcagcccacccgttcatcctgatttggggaaacaagaagctaaagcagacttatctttcagttttgtggcaaatgaggtactgr

SEQ ID NO: 4925 - DNA, 108 bp, Homo sapiens
caagctattggattcagctgttcttcagcccacccgttcatcctgatttggggaaacaagaagctaaagcagacttatctttcagttttgtggcaaatgasgtactga

SEQ ID NO: 4926 - DNA, 201 bp, Homo sapiens
tctgtgtaaacatctcaagaagatgcagctccatggcaaaggatctcaagatcccagtaccaaggtccacataaaagttttgcaaactgtgatctccttcytcttgttatgtgccatttactttgtgtctgtaataatatcagtttggagttttaagaatctggaaaacaaacctgtcttcatgttctgccaagctattgg

SEQ ID NO: 4927 - DNA, 201 bp, Homo sapiens
caaagttcaagcgatatgagtctcatccagtctgtgctgatctgcaggccaaaattcttcagtgttaccgtgagaacacccaccagaccctcaaatgctcygctctggccacccagtatatgcactgtgtcaatcatgccaaacagagcatgcttgagaagggaggataaaaactttcagaatgagcaaaacaccatcaac

SEQ ID NO: 4928 - DNA, 201 bp, Homo sapiens; identical to SEQ ID NO: 4927

SEQ ID NO: 4929 - DNA, 201 bp, Homo sapiens
ccgggtcgggtgaaccaatccgggcgccctcgccgaacagaggcgggcagttcgcatcgccgaccaacctgaggcgtttttgttgtggcgcgtgaccggargaggcgggagctcaggaccggcgccttctccttgcttctgggggtcgtggccttgctcccgctgtgcgggaaaagaatccaggcccttccacgcgcgtgt

SEQ ID NO: 4930 - DNA, 201 bp, Homo sapiens
attgaaataaactcactgcatgcggcatacccttcaaagacatttttcctccctttggaacagttgaaattcaaatgacatatcctagcatgatttgccacatgggttgtgttttgaaacccaaatctaacacaacaaatttcagatagagctttgtttagcccccaggccagtttttggtcccgtggataagggttggta

SEQ ID NO: 4931 - DNA, 201 bp, Homo sapiens
caggccagtttttggtcccgtggataagggttggtatccagacctcttagagcttttctgcatcagctttccagggcttattcaaaccctccatgtgctgkaagtccctcaccctttatgaggcacaggaggcgatacgcttgcatctcgatctctcagcctcggctcatgctgttctctcctttctcatcctgtgttcca

SEQ ID NO: 4932 - DNA, 130 bp, Homo sapiens
attctctcctccaccttttactctcaacctgatgaccccatacttaatctttcaggacttggctccagggccacgtgcttccacagtattttctcacttgyttgctttatgcagtttatttattgagaca

SEQ ID NO: 4933 - DNA, 201 bp, Homo sapiens
aagaatctccactctggcagtggggaggaggaaggaagtggaggtttgttggctttactttgccatccatccctttctctatgtggtagagaaggactgaraggagtgatcccacaggacacaggttcccccgtgtctgtcaccttcaagggggctcaggctcccagggggaaggcacaggggaatcacggagttcagttc

SEQ ID NO: 4934 - DNA, 201 bp, Homo sapiens
ctaaacttaagtctagaaaataccaccctgtctattacatggagcagctgtgagaatagaataaagaaaattgtttccttttttcttttttctgagacaakcagtagtgcaatcaaggctcactgcagcctcagcctcctgggctcaagcagtcctcccatctcagcctccggagtagctgggactacagacacacactac

SEQ ID NO: 4935 - DNA, 138 bp, Homo sapiens
tgaccggccaagaaaattctttaccgataaaaaccttatttctatttacttggtcatccatttcaaccagacaagcttgaccaaagttgtggcctttttcyggaacattgcaaaaagtttctgaatgcttttgacttc

SEQ ID NO: 4936 - DNA, 201 bp, Homo sapiens
tgtttccttttttcttttttctgagacaatcagtagtgcaatcaaggctcactgcagcctcagcctcctgggctcaagcagtcctcccatctcagcctccrgagtagctgggactacagacacacactactgtgcctggctaatttttgtattttttgtagagacaaggtttgccatattccccaggctggtctctaactc

SEQ ID NO: 4937 - DNA, 201 bp, Homo sapiens
actacagacacacactactgtgcctggctaatttttgtattttttgtagagacaaggtttgccatattccccaggctggtctctaactccagggctcaagygactctcccacctcagcatcccaaagtgttgagattacaggcatgagccactgtgaccggccaagaaaattctttaccgataaaaaccttatttctattt

SEQ ID NO: 4938 - DNA, 201 bp, Homo sapiens
ttttgtattttttgtagagacaaggtttgccatattccccaggctggtctctaactccagggctcaagtgactctcccacctcagcatcccaaagtgttgmgattacaggcatgagccactgtgaccggccaagaaaattctttaccgataaaaaccttatttctatttacttggtcatccatttcaaccagacaagcttg

SEQ ID NO: 4939 - DNA, 201 bp, Homo sapiens
aaattagtgaggttcaggaaaaagtgaatgaactgaaacaattcaaggagcatcgcaaagccaaggattcagcactacaaagtatagaaagtaagatgctygagttgaccaacagacttcaagaaagtcaagaagaaatacaaattatgattaaggaaaaagaggaaatgaaaagagtacaggaggcccttcagatagaga

SEQ ID NO: 4940 - DNA, 201 bp, Homo sapiens
gaatgaactgaaacaattcaaggagcatcgcaaagccaaggattcagcactacaaagtatagaaagtaagatgctcgagttgaccaacagacttcaagaamgtcaagaagaaatacaaattatgattaaggaaaaagaggaaatgaaaagagtacaggaggcccttcagatagagagagaccaactgaaagaaaacactaa

SEQ ID NO: 4941 - DNA, 201 bp, Homo sapiens
atcgaagcttatttattttgggacaagtgatcaagaaacttagtgatggacaagttggtggtttcataaattatcgagatagcaagttaacacgaattctycagaattccttgggaggaaatgcaaagacacgtattatctgcacaattactccagtatcttttgatgaaacacttactgctctccagtttgccagtactg

SEQ ID NO: 4942 - DNA, 201 bp, Homo sapiens
gaaagaacatattagagaaactttggctaaaatccaggagtctcaaagcaaacaagaacagtccttaaatatgaaagaaaaagacaatgaaactaccaaartcgtgagtgagatggagcaattcaaacccaaagattcagcactactaaggatagaaatagaaatgctcggattgtccaaaagacttcaagaaagtcatga

SEQ ID NO: 4943 - DNA, 201 bp, Homo sapiens
caattcatagcaaccttaagggaaatgatagctagagaccgacagaaccaccaagtaaaacctgaaaaaaggttactaagtgatggacaacagcaccttayggaaagcctgagagaaaagtgctctagaataaaagagcttttgaagagatactcagagatggatgatcattatgagtgcttgaatagattgtctcttgac

SEQ ID NO: 4944 - DNA, 201 bp, Homo sapiens
atatgaaagaaaaagacaatgaaactaccaaaatcgtgagtgagatggagcaattcaaacccaaagattcagcactactaaggatagaaatagaaatgctyggattgtccaaaagacttcaagaaagtcatgatgaaatgaaatctgtagctaaggagaaagatgacctacagaggctgcaagaagttcttcaatctgaaa

SEQ ID NO: 4945 - DNA, 201 bp, Homo sapiens
cctttcttagaagtgaaaatctggagctgaaggagaaaatgaaagaacttgcaactacatacaagcaaatggaaaatgatattcagttatatcaaagccarttggaggcaaaaaagaaaatgcaagttgatctggagaaagaattacaatctgcttttaatgagataacaaaactcacctcccttatagatggcaaagttc

SEQ ID NO: 4946 - DNA, 201 bp, Homo sapiens
tctgcacaattactccagtatcttttgatgaaacacttactgctctccagtttgccagtactgctaaatatatgaagaatactccttatgttaatgaggtrtcaactgatgaagctctcctgaaaaggtatagaaaagaaataatggatcttaaaaaacaattagaggaggtttctttagagacgcgggctcaggcaatgg

SEQ ID NO: 4947 - DNA, 201 bp, Homo sapiens
aactaaaaactgctcgtatgctatcaaaagaacacaaagaaactgttgataaacttagagaaaaaatttcagaaaagacaattcaaatttcagacattcaraaggatttagataaatcaaaagatgaattacagaaaaagatccaagaacttcagaaaaaagaacttcaactgcttagagtgaaagaagatgtcaatatga

SEQ ID NO: 4948 - DNA, 201 bp, Homo sapiens
gataggatggcggaggaaggagccgtggccgtctgcgtgcgagtgcggccgctgaacagcagagaagaatcacttggagaaactgcccaagtttactggamaactgacaataatgtcatttatcaagttgatggaagtaaatccttcaattttgatcgtgtctttcatggtaatgaaactaccaaaaatgtgtatgaagaa

SEQ ID NO: 4949 - DNA, 201 bp, Homo sapiens
tcttaatgtacaagaagagatgagtgagatgcagaaaaagattaatgaaatagagaatttaaagaatgaattaaagaacaaagaattgacattggaacatwtggaaacagagaggcttgagttggctcagaaacttaatgaaaattatgaggaagtgaaatctataaccaaagaaagaaaagttctaaaggaattacagaa

SEQ ID NO: 4950 - DNA, 201 bp, Homo sapiens
aggttgaatgaaaaatttcaagaaagtcaggaagagataaaatctctaaccaaggaaagagacaaccttaaaacgataaaagaagcccttgaagttaaacwtgaccagctgaaagaacatattagagaaactttggctaaaatccaggagtctcaaagcaaacaagaacagtccttaaatatgaaagaaaaagacaatgaa

SEQ ID NO: 4951 - DNA, 201 bp, Homo sapiens
catgaaaaccttgaagaaatgaaatctgtaatgaaagaaagagataatctaagaagagtagaggagacactcaaactggagagagaccaactcaaggaaascctgcaagaaaccaaagctagagatctggaaatacaacaggaactaaaaactgctcgtatgctatcaaaagaacacaaagaaactgttgataaacttaga

SEQ ID NO: 4952 - DNA, 201 bp, Homo sapiens
tctcttgacttggagaaggaaattgaattccacagaatcatgaagaaactgaagtatgtgttaagctatgttacaaaaataaaagaagaacaacatgaatscatcaataaatttgaaatggattttattgatgaagtggaaaagcaaaaggaattgctaattaaaatacagcaccttcaacaagattgtgatgtaccatcc

SEQ ID NO: 4953 - DNA, 201 bp, Homo sapiens
agagaaggaaactgaaatatcaaccattcaaaagcagttagaagcaatcaatgataaattacagaacaagatccaagagatttatgagaaagaggaacaayttaatataaaacaaattagtgaggttcaggaaaaagtgaatgaactgaaacaattcaaggagcatcgcaaagccaaggattcagcactacaaagtataga

SEQ ID NO: 4954 - DNA, 201 bp, Homo sapiens
cagataaactatcaaatatgcaaaaagatttagaaaattcaaatgctaaattacaagaaaagattcaagaacttaaggcaaatgaacatcaacttattacrttaaaaaaagatgtcaatgagacacagaaaaaagtgtctgaaatggagcaactaaagaaacaaataaaagaccaaagcttaactctgagtaaattagaaa

SEQ ID NO: 4955 - DNA, 201 bp, Homo sapiens
attttgatcgtgtctttcatggtaatgaaactaccaaaaatgtgtatgaagaaatagcagcaccaatcatcgattctgccatacaaggctacaatggtacyatatttgcctatggacagactgcttcaggaaaaacatataccatgatgggttcagaagatcatttgggagttatacccagggcaattcatgacattttcc

SEQ ID NO: 4956 - DNA, 201 bp, Homo sapiens
tgaatagattgtctcttgacttggagaaggaaattgaattccacagaatcatgaagaaactgaagtatgtgttaagctatgttacaaaaataaaagaagarcaacatgaatccatcaataaatttgaaatggattttattgatgaagtggaaaagcaaaaggaattgctaattaaaatacagcaccttcaacaagattgtg

SEQ ID NO: 4957 - DNA, 201 bp, Homo sapiens
ataatctaagaagagtagaggagacactcaaactggagagagaccaactcaaggaaagcctgcaagaaaccaaagctagagatctggaaatacaacaggamctaaaaactgctcgtatgctatcaaaagaacacaaagaaactgttgataaacttagagaaaaaatttcagaaaagacaattcaaatttcagacattcaaa

SEQ ID NO: 4958 - DNA, 201 bp, Homo sapiens
aagttgatctggagaaagaattacaatctgcttttaatgagataacaaaactcacctcccttatagatggcaaagttccaaaagatttgctctgtaatttrgaattggaaggaaagattactgatcttcagaaagaactaaataaagaagttgaagaaaatgaagctttgcgggaagaagtcattttgctttcagaattga

SEQ ID NO: 4959 - DNA, 201 bp, Homo sapiens; identical to SEQ ID NO: 4939

SEQ ID NO: 4960 - DNA, 201 bp, Homo sapiens; identical to SEQ ID NO: 4940

SEQ ID NO: 4961 - DNA, 201 bp, Homo sapiens; identical to SEQ ID NO: 4941

SEQ ID NO: 4962 - DNA, 201 bp, Homo sapiens; identical to SEQ ID NO: 4942

SEQ ID NO: 4963 - DNA, 201 bp, Homo sapiens
accttaagggaaatgatagctagagaccgacagaaccaccaagtaaaacctgaaaaaaggttactaagtgatggacaacagcaccttacggaaagcctgayagaaaagtgctctagaataaaagagcttttgaagagatactcagagatggatgatcattatgagtgcttgaatagattgtctcttgacttggagaaggaa

SEQ ID NO: 4964 - DNA, 201 bp, Homo sapiens; identical to SEQ ID NO: 4944

SEQ ID NO: 4965 - DNA, 201 bp, Homo sapiens; identical to SEQ ID NO: 4945

SEQ ID NO: 4966 - DNA, 201 bp, Homo sapiens; identical to SEQ ID NO: 4946

SEQ ID NO: 4967 - DNA, 201 bp, Homo sapiens
ctcgtatgctatcaaaagaacacaaagaaactgttgataaacttagagaaaaaatttcagaaaagacaattcaaatttcagacattcaaaaggatttagaraaatcaaaagatgaattacagaaaaagatccaagaacttcagaaaaaagaacttcaactgcttagagtgaaagaagatgtcaatatgagtcataaaaaaa

SEQ ID NO: 4968 - DNA, 201 bp, Homo sapiens; identical to SEQ ID NO: 4948

SEQ ID NO: 4969 - DNA, 201 bp, Homo sapiens; identical to SEQ ID NO: 4949

SEQ ID NO: 4970 - DNA, 201 bp, Homo sapiens; identical to SEQ ID NO: 4950

SEQ ID NO: 4971 - DNA, 201 bp, Homo sapiens
gaagaaatgaaatctgtaatgaaagaaagagataatctaagaagagtagaggagacactcaaactggagagagaccaactcaaggaaagcctgcaagaaascaaagctagagatctggaaatacaacaggaactaaaaactgctcgtatgctatcaaaagaacacaaagaaactgttgataaacttagagaaaaaatttca

SEQ ID NO: 4972 - DNA, 201 bp, Homo sapiens
ttggagaaggaaattgaattccaaaaagagctttcaatgagagttaaagcaaacctctcacttccctatttacaaaccaaacacattgaaaaactttttastgcaaaccagagatgctccatggaattccacagaatcatgaagaaactgaagtatgtgttaagctatgttacaaaaataaaagaagaacaacatgaatcc

SEQ ID NO: 4973 - DNA, 201 bp, Homo sapiens; identical to SEQ ID NO: 4953

SEQ ID NO: 4974 - DNA, 201 bp, Homo sapiens
caaatatgcaaaaagatttagaaaattcaaatgctaaattacaagaaaagattcaagaacttaaggcaaatgaacatcaacttattacgttaaaaaaagargtcaatgagacacagaaaaaagtgtctgaaatggagcaactaaagaaacaaataaaagaccaaagcttaactctgagtaaattagaaatagagaatttaa

SEQ ID NO: 4975 - DNA, 201 bp, Homo sapiens; identical to SEQ ID NO: 4955

SEQ ID NO: 4976 - DNA, 201 bp, Homo sapiens
tgtctcttgacttggagaaggaaattgaattccaaaaagagctttcaatgagagttaaagcaaacctctcacttccctatttacaaaccaaacacattgaraaactttttactgcaaaccagagatgctccatggaattccacagaatcatgaagaaactgaagtatgtgttaagctatgttacaaaaataaaagaagaac

SEQ ID NO: 4977 - DNA, 201 bp, Homo sapiens
gagtagaggagacactcaaactggagagagaccaactcaaggaaagcctgcaagaaaccaaagctagagatctggaaatacaacaggaactaaaaactgcmcgtatgctatcaaaagaacacaaagaaactgttgataaacttagagaaaaaatttcagaaaagacaattcaaatttcagacattcaaaaggatttagata

SEQ ID NO: 4978 - DNA, 201 bp, Homo sapiens; identical to SEQ ID NO: 4958

SEQ ID NO: 4979 - DNA, 201 bp, Homo sapiens
atgaagttggagagcttctcatgttcttcctttgtataaagtttgcatacgtacaaaacccaggactttaatgactttaagagggggcagaattgcatctyttggaagttaacagactcatgtgaactggaatgtacgttgtggccctcacaattgattttaatatttatttgcaaagtcctttctgtttctaaataaaag

SEQ ID NO: 4980 - DNA, 201 bp, Homo sapiens
acagcctgttcggttacatggaggacctgcaggagctcaccatcatcgagaggccggtccgccggagcctcaagacaccggaagaaatagaaagattgacrgtcgatgaagacctcagtgatattgaaagggctgtttatctgctcagtgctggtcaagatgtccaaggaacaagtgtgattgcaaatctcccatttttga

SEQ ID NO: 4981 - DNA, 201 bp, Homo sapiens
gaggccggtccgccggagcctcaagacaccggaagaaatagaaagattgacagtcgatgaagacctcagtgatattgaaagggctgtttatctgctcagtkctggtcaagatgtccaaggaacaagtgtgattgcaaatctcccatttttgatgcgacagaatcccactgagacgcttcggagagtgttgccaaaagtcag

SEQ ID NO: 4982 - DNA, 201 bp, Homo sapiens
aactgcttgatgaaggaggcaaaacaaaggcagcaggagataatgtgattggtacacaaaagctaaagcagtggctggggctttgtttttaaattttgggtttttttttttgttgttgttaatgagcagaaagagagacataatgacagctgatgttaaacttttcatatttcaaattagattccctaggaggtataatat

SEQ ID NO: 4983 - DNA, 201 bp, Homo sapiens; identical to SEQ ID NO: 4980

SEQ ID NO: 4984 - DNA, 201 bp, Homo sapiens
gttggacagaatggaaatgtctatggatgcttttcagaaaaagttttatgagaaagatttgttggatcaagagaaagaaagagaagaactacttcttttgsaaatggaacaattagagaaagaaaagcaacagaatgatggaaggcccatgagtgataaaatgtttgaaaagaaacgtagagacactaagacaccaacgca

SEQ ID NO: 4985 - DNA, 201 bp, Homo sapiens
cacactgaaaggatgcaaatagccgtctgcgattttggcggccctccggattgtggtgacaatatgttgtacccggacattcccaaatttaaatttggcartgaaaattccacaaagatttctggtaactttgagctataaataccttaaaaataatagattgatgattttctttatttcctagagaatttattttataaa

SEQ ID NO: 4986 - DNA, 201 bp, Homo sapiens
gaggccggtccgccggagcctcaagacaccggaagaaatagaaagattgacagtcgatgaagacctcagtgatattgaaagggctgtttatctgctcagtkctggtcaagatgtccaaggaacaagtgtgattgcaaatctcccatttttgatgcgacagaatcccactgagacgcttcggagagtgttgccaaaatggaa

SEQ ID NO: 4987 - DNA, 201 bp, Homo sapiens; identical to SEQ ID NO: 4982

SEQ ID NO: 4988 - DNA, 201 bp, Homo sapiens; identical to SEQ ID NO: 4980

SEQ ID NO: 4989 - DNA, 201 bp, Homo sapiens; identical to SEQ ID NO: 4984

SEQ ID NO: 4990 - DNA, 201 bp, Homo sapiens; identical to SEQ ID NO: 4985

SEQ ID NO: 4991 - DNA, 201 bp, Homo sapiens; identical to SEQ ID NO: 4981

SEQ ID NO: 4992 - DNA, 201 bp, Homo sapiens
ctccctccgtctctaccaggaatggccttgtcctatggaaggcactgccccatcccaaactaatctaggaatcactgtctaaccactcactgtcatgaatrtgtacttaaaggatgaggttgagtcataccaaatagtgatttcgatagttcaaaatggtgaaattagcaattctacatgattcagtctaatcaatggata

SEQ ID NO: 4993 - DNA, 201 bp, Homo sapiens
gctgtgctgaccatcgacgagaaagggactgaagctgctggggccatgtttttagaggccatacccatgtctatcccccccgaggtcaagttcaacaaacyctttgtcttcttaatgattgaacaaaataccaagtctcccctcttcatgggaaaagtggtgaatcccacccaaaaataactgcctctcgctcctcaaccc

SEQ ID NO: 4994 - DNA, 201 bp, Homo sapiens
ggctgtgctgaccatcgacgagaaagggactgaagctgctggggccatgtttttagaggccatacccatgtctatcccccccgaggtcaagttcaacaaaycctttgtcttcttaatgattgaacaaaataccaagtctcccctcttcatgggaaaagtggtgaatcccacccaaaaataactgcctctcgctcctcaacc

SEQ ID NO: 4995 - DNA, 201 bp, Homo sapiens
ctctgagtcccgactggggccacatgcagcctgacttctttgtgcctgttgctgtccctgcagtcttcagagggccaccgcagctccagtgccacggcagraggctgttcctgaatagcccctgtggtaagggccaggagagtccttccatcctccaaggccctgctaaaggacacagcagccaggaagtcccctgggccc

SEQ ID NO: 4996 - DNA, 201 bp, Homo sapiens
aggtcaagttcaacaaaccctttgtcttcttaatgattgaacaaaataccaagtctcccctcttcatgggaaaagtggtgaatcccacccaaaaataactkcctctcgctcctcaacccctcccctccatccctggccccctccctggatgacattaaagaagggttgagctggtccctgcctgcatgtgactgtaaatcc

SEQ ID NO: 4997 - DNA, 201 bp, Homo sapiens
agatgctgcccagaagacagatacatcccaccatgatcaggatcacccaaccttcaacaagatcacccccaacctggctgagttcgccttcagcctatacygccagctggcacaccagtccaacagcaccaatatcttcttctccccagtgagcatcgctacagcctttgcaatgctctccctggggaccaaggctgacac

SEQ ID NO: 4998 - DNA, 201 bp, Homo sapiens
gcccagaagacagatacatcccaccatgatcaggatcacccaaccttcaacaagatcacccccaacctggctgagttcgccttcagcctataccgccagcyggcacaccagtccaacagcaccaatatcttcttctccccagtgagcatcgctacagcctttgcaatgctctccctggggaccaaggctgacactcacgat

SEQ ID NO: 4999 - DNA, 201 bp, Homo sapiens
cacccaaccttcaacaagatcacccccaacctggctgagttcgccttcagcctataccgccagctggcacaccagtccaacagcaccaatatcttcttctycccagtgagcatcgctacagcctttgcaatgctctccctggggaccaaggctgacactcacgatgaaatcctggagggcctgaatttcaacctcacggag

SEQ ID NO: 5000 - DNA, 201 bp, Homo sapiens
ctccctttgcctgctgaggctgtatgtgggctccaggtaacagtgctgtcttcgggccccctgaactgtgttcatggagcatctggctgggtaggcacatrctgggcttgaatccaggggggactgaatcctcagcttacggacctgggcccatctgtttctggagggctccagtcttccttgtcctgtcttggagtcccc

SEQ ID NO: 5001 - DNA, 201 bp, Homo sapiens
aggcacatgctgggcttgaatccaggggggactgaatcctcagcttacggacctgggcccatctgtttctggagggctccagtcttccttgtcctgtcttkgagtccccaagaaggaatcacaggggaggaaccagataccagccatgaccccaggctccaccaagcatcttcatgtccccctgctcatcccccactcccc

SEQ ID NO: 5002 - DNA, 201 bp, Homo sapiens
ggcaatgagcaaggctccttcctgtccaagctccccgcccctccccagcctactgcctccacccgaagtctacttcctgggtgggcaggaactgggcactstgcccagggcatgcactgcctccacgcagcaaccctcagagtcctgagctgaaccaagaaggaggagggggtcgggcctccgaggaaggcctagccgctg

SEQ ID NO: 5003 - DNA, 201 bp, Homo sapiens
gtgaatcccacccaaaaataactgcctctcgctcctcaacccctcccctccatccctggccccctccctggatgacattaaagaagggttgagctggtccytgcctgcatgtgactgtaaatccctcccatgttttctctgagtctccctttgcctgctgaggctgtatgtgggctccaggtaacagtgctgtcttcgggc

SEQ ID NO: 5004 - DNA, 201 bp, Homo sapiens
acagcctttgcaatgctctccctggggaccaaggctgacactcacgatgaaatcctggagggcctgaatttcaacctcacggagattccggaggctcagawccatgaaggcttccaggaactcctccgtaccctcaaccagccagacagccagctccagctgaccaccggcaatggcctgttcctcagcgagggcctgaag

SEQ ID NO: 5005 - DNA, 201 bp, Homo sapiens
ttctccccagtgagcatcgctacagcctttgcaatgctctccctggggaccaaggctgacactcacgatgaaatcctggagggcctgaatttcaacctcayggagattccggaggctcagatccatgaaggcttccaggaactcctccgtaccctcaaccagccagacagccagctccagctgaccaccggcaatggcctg

SEQ ID NO: 5006 - DNA, 201 bp, Homo sapiens
aagggactgaagctgctggggccatgtttttagaggccatacccatgtctatcccccccgaggtcaagttcaacaaaccctttgtcttcttaatgattgamcaaaataccaagtctcccctcttcatgggaaaagtggtgaatcccacccaaaaataactgcctctcgctcctcaacccctcccctccatccctggccccc

SEQ ID NO: 5007 - DNA, 201 bp, Homo sapiens
gtttaggcatgtttaacatccagcactgtaagaagctgtccagctgggtgctgctgatgaaatacctgggcaatgccaccgccatcttcttcctgcctgaygaggggaaactacagcacctggaaaatgaactcacccacgatatcatcaccaagttcctggaaaatgaagacagaaggtctgccagcttacatttaccca

SEQ ID NO: 5008 - DNA, 201 bp, Homo sapiens
aactgggcatcactaaggtcttcagcaatggggctgacctctccggggtcacagaggaggcacccctgaagctctccaaggccgtgcataaggctgtgctkaccatcgacgagaaagggactgaagctgctggggccatgtttttagaggccatacccatgtctatcccccccgaggtcaagttcaacaaaccctttgtct

SEQ ID NO: 5009 - DNA, 201 bp, Homo sapiens
cactgtgcccagggcatgcactgcctccacgcagcaaccctcagagtcctgagctgaaccaagaaggaggagggggtcgggcctccgaggaaggcctagcygctgctgctgccaggaattccaggttggaggggcggcaacctcctgccagccttcaggccactctcctgtgcctgccagaagagacagagcttgaggaga

SEQ ID NO: 5010 - DNA, 201 bp, Homo sapiens
ggctgacctctccggggtcacagaggaggcacccctgaagctctccaaggccgtgcataaggctgtgctgaccatcgacgagaaagggactgaagctgctkgggccatgtttttagaggccatacccatgtctatcccccccgaggtcaagttcaacaaaccctttgtcttcttaatgattgaacaaaataccaagtctcc

SEQ ID NO: 5011 - DNA, 201 bp, Homo sapiens
atgtctatcccccccgaggtcaagttcaacaaaccctttgtcttcttaatgattgaacaaaataccaagtctcccctcttcatgggaaaagtggtgaatcmcacccaaaaataactgcctctcgctcctcaacccctcccctccatccctggccccctccctggatgacattaaagaagggttgagctggtccctgcctgc

SEQ ID NO: 5012 - DNA, 201 bp, Homo sapiens
gctctccaaggccgtgcataaggctgtgctgaccatcgacgagaaagggactgaagctgctggggccatgtttttagaggccatacccatgtctatccccyccgaggtcaagttcaacaaaccctttgtcttcttaatgattgaacaaaataccaagtctcccctcttcatgggaaaagtggtgaatcccacccaaaaata

SEQ ID NO: 5013 - DNA, 201 bp, Homo sapiens
ctgccccatcccaaactaatctaggaatcactgtctaaccactcactgtcatgaatgtgtacttaaaggatgaggttgagtcataccaaatagtgatttcsatagttcaaaatggtgaaattagcaattctacatgattcagtctaatcaatggataccgactgtttcccacacaagtctcctgttctcttaagcttactc

SEQ ID NO: 5014 - DNA, 201 bp, Homo sapiens
cactgtaagaagctgtccagctgggtgctgctgatgaaatacctgggcaatgccaccgccatcttcttcctgcctgatgaggggaaactacagcacctggwaaatgaactcacccacgatatcatcaccaagttcctggaaaatgaagacagaaggtctgccagcttacatttacccaaactgtccattactggaacctat

SEQ ID NO: 5015 - DNA, 201 bp, Homo sapiens
gtctatcccccccgaggtcaagttcaacaaaccctttgtcttcttaatgattgaacaaaataccaagtctcccctcttcatgggaaaagtggtgaatcccmcccaaaaataactgcctctcgctcctcaacccctcccctccatccctggccccctccctggatgacattaaagaagggttgagctggtccctgcctgcat

SEQ ID NO: 5016 - DNA, 201 bp, Homo sapiens
caagttcaacaaaccctttgtcttcttaatgattgaacaaaataccaagtctcccctcttcatgggaaaagtggtgaatcccacccaaaaataactgcctytcgctcctcaacccctcccctccatccctggccccctccctggatgacattaaagaagggttgagctggtccctgcctgcatgtgactgtaaatccctcc

SEQ ID NO: 5017 - DNA, 201 bp, Homo sapiens
tgactcagtaaatggtagatcttgctaccagtggaacagccactaaggattctgcagtgagagcagagggccagctaagtggtactctcccagagactgtstgactcacgccaccccctccaccttggacacaggacgctgtggtttctgagccagcagcctcccccgttgcccctctggatccactgcttaaatacggac

SEQ ID NO: 5018 - DNA, 201 bp, Homo sapiens
ccaaggccctgctaaaggacacagcagccaggaagtcccctgggcccctagctgaaggacagcctgctccctccgtctctaccaggaatggccttgtcctrtggaaggcactgccccatcccaaactaatctaggaatcactgtctaaccactcactgtcatgaatgtgtacttaaaggatgaggttgagtcataccaaat

SEQ ID NO: 5019 - DNA, 201 bp, Homo sapiens
cctgggtcaactgggcatcactaaggtcttcagcaatggggctgacctctccggggtcacagaggaggcacccctgaagctctccaaggccgtgcataagrctgtgctgaccatcgacgagaaagggactgaagctgctggggccatgtttttagaggccatacccatgtctatcccccccgaggtcaagttcaacaaacc

SEQ ID NO: 5020 - DNA, 201 bp, Homo sapiens
tttcaacctcacggagattccggaggctcagatccatgaaggcttccaggaactcctccgtaccctcaaccagccagacagccagctccagctgaccaccrgcaatggcctgttcctcagcgagggcctgaagctagtggataagtttttggaggatgttaaaaagttgtaccactcagaagccttcactgtcaacttcgg

SEQ ID NO: 5021 - DNA, 201 bp, Homo sapiens
gcacccctgaagctctccaaggccgtgcataaggctgtgctgaccatcgacgagaaagggactgaagctgctggggccatgtttttagaggccatacccakgtctatcccccccgaggtcaagttcaacaaaccctttgtcttcttaatgattgaacaaaataccaagtctcccctcttcatgggaaaagtggtgaatccc

SEQ ID NO: 5022 - DNA, 201 bp, Homo sapiens
cggcaatggcctgttcctcagcgagggcctgaagctagtggataagtttttggaggatgttaaaaagttgtaccactcagaagccttcactgtcaacttcrgggacaccgaagaggccaagaaacagatcaacgattacgtggagaagggtactcaagggaaaattgtggatttggtcaaggagcttgacagagacacagt

SEQ ID NO: 5023 - DNA, 201 bp, Homo sapiens
ccatcgacgagaaagggactgaagctgctggggccatgtttttagaggccatacccatgtctatcccccccgaggtcaagttcaacaaaccctttgtcttyttaatgattgaacaaaataccaagtctcccctcttcatgggaaaagtggtgaatcccacccaaaaataactgcctctcgctcctcaacccctcccctcca

SEQ ID NO: 5024 - DNA, 201 bp, Homo sapiens
ctttaaaggcaaatgggagagaccctttgaagtcaaggacaccgaggaagaggacttccacgtggaccaggcgaccaccgtgaaggtgcctatgatgaagygtttaggcatgtttaacatccagcactgtaagaagctgtccagctgggtgctgctgatgaaatacctgggcaatgccaccgccatcttcttcctgcctga

SEQ ID NO: 5025 - DNA, 201 bp, Homo sapiens
aggtcttcagcaatggggctgacctctccggggtcacagaggaggcacccctgaagctctccaaggccgtgcataaggctgtgctgaccatcgacgagaargggactgaagctgctggggccatgtttttagaggccatacccatgtctatcccccccgaggtcaagttcaacaaaccctttgtcttcttaatgattgaac

SEQ ID NO: 5026 - DNA, 201 bp, Homo sapiens
gccttcagcctataccgccagctggcacaccagtccaacagcaccaatatcttcttctccccagtgagcatcgctacagcctttgcaatgctctccctggrgaccaaggctgacactcacgatgaaatcctggagggcctgaatttcaacctcacggagattccggaggctcagatccatgaaggcttccaggaactcctc

SEQ ID NO: 5027 - DNA, 201 bp, Homo sapiens
taggcctgctgatggctcaggaaggccattgcaaggactcctcagctatgggagaggaagcacatcacccattgacccccgcaacccctccctttcctccyctgagtcccgactggggccacatgcagcctgacttctttgtgcctgttgctgtccctgcagtcttcagagggccaccgcagctccagtgccacggcagga

SEQ ID NO: 5028 - DNA, 201 bp, Homo sapiens
tgggcatcactaaggtcttcagcaatggggctgacctctccggggtcacagaggaggcacccctgaagctctccaaggccgtgcataaggctgtgctgacsatcgacgagaaagggactgaagctgctggggccatgtttttagaggccatacccatgtctatcccccccgaggtcaagttcaacaaaccctttgtcttct

SEQ ID NO: 5029 - DNA, 201 bp, Homo sapiens
agagcgtcctgggtcaactgggcatcactaaggtcttcagcaatggggctgacctctccggggtcacagaggaggcacccctgaagctctccaaggccgtscataaggctgtgctgaccatcgacgagaaagggactgaagctgctggggccatgtttttagaggccatacccatgtctatcccccccgaggtcaagttca

SEQ ID NO: 5030 - DNA, 201 bp, Homo sapiens
gaagaggagggtctctgctttgttttctctatctcctcctcagacttgaccaggcccagcaggccccagaagaccattaccctatatcccttctcctcccyagtcacatggccataggcctgctgatggctcaggaaggccattgcaaggactcctcagctatgggagaggaagcacatcacccattgacccccgcaaccc

SEQ ID NO: 5031 - DNA, 201 bp, Homo sapiens
tgaaggtgcctatgatgaagcgtttaggcatgtttaacatccagcactgtaagaagctgtccagctgggtgctgctgatgaaatacctgggcaatgccacygccatcttcttcctgcctgatgaggggaaactacagcacctggaaaatgaactcacccacgatatcatcaccaagttcctggaaaatgaagacagaaggt

SEQ ID NO: 5032 - DNA, 201 bp, Homo sapiens
acagtttttgctctggtgaattacatcttctttaaaggcaaatgggagagaccctttgaagtcaaggacaccgaggaagaggacttccacgtggaccaggygaccaccgtgaaggtgcctatgatgaagcgtttaggcatgtttaacatccagcactgtaagaagctgtccagctgggtgctgctgatgaaatacctgggc

SEQ ID NO: 5033 - DNA, 201 bp, Homo sapiens
atccactgcttaaatacggacgaggacagggccctgtctcctcagcttcaggcaccaccactgacctgggacagtgaatcgacaatgccgtcttctgtctygtggggcatcctcctgctggcaggcctgtgctgcctggtccctgtctccctggctgaggatccccagggagatgctgcccagaagacagatacatcccac

SEQ ID NO: 5034 - DNA, 201 bp, Homo sapiens
cacggagattccggaggctcagatccatgaaggcttccaggaactcctccgtaccctcaaccagccagacagccagctccagctgaccaccggcaatggcytgttcctcagcgagggcctgaagctagtggataagtttttggaggatgttaaaaagttgtaccactcagaagccttcactgtcaacttcggggacaccga

SEQ ID NO: 5035 - DNA, 201 bp, Homo sapiens
gcatcttcatgtccccctgctcatcccccactcccccccacccagagttgctcatcctgccagggctggctgtgcccaccccaaggctgccctcctggggrccccagaactgcctgatcgtgccgtggcccagttttgtggcatctgcagcaacacaagagagaggacaatgtcctcctcttgacccgctgtcacctaacc

SEQ ID NO: 5036 - DNA, 201 bp, Homo sapiens
ctcgtggggcatcctcctgctggcaggcctgtgctgcctggtccctgtctccctggctgaggatccccagggagatgctgcccagaagacagatacatccmaccatgatcaggatcacccaaccttcaacaagatcacccccaacctggctgagttcgccttcagcctataccgccagctggcacaccagtccaacagcac

SEQ ID NO: 5037 - DNA, 201 bp, Homo sapiens
aagtcaaggacaccgaggaagaggacttccacgtggaccaggcgaccaccgtgaaggtgcctatgatgaagcgtttaggcatgtttaacatccagcactgkaagaagctgtccagctgggtgctgctgatgaaatacctgggcaatgccaccgccatcttcttcctgcctgatgaggggaaactacagcacctggaaaatg

SEQ ID NO: 5038 - DNA, 201 bp, Homo sapiens
aggacaccgaggaagaggacttccacgtggaccaggcgaccaccgtgaaggtgcctatgatgaagcgtttaggcatgtttaacatccagcactgtaagaarctgtccagctgggtgctgctgatgaaatacctgggcaatgccaccgccatcttcttcctgcctgatgaggggaaactacagcacctggaaaatgaactca

SEQ ID NO: 5039 - DNA, 201 bp, Homo sapiens
ttcagcctataccgccagctggcacaccagtccaacagcaccaatatcttcttctccccagtgagcatcgctacagcctttgcaatgctctccctggggaycaaggctgacactcacgatgaaatcctggagggcctgaatttcaacctcacggagattccggaggctcagatccatgaaggcttccaggaactcctccgt

SEQ ID NO: 5040 - DNA, 201 bp, Homo sapiens
cacccacgatatcatcaccaagttcctggaaaatgaagacagaaggtctgccagcttacatttacccaaactgtccattactggaacctatgatctgaagwgcgtcctgggtcaactgggcatcactaaggtcttcagcaatggggctgacctctccggggtcacagaggaggcacccctgaagctctccaaggccgtgca

SEQ ID NO: 5041 - DNA, 201 bp, Homo sapiens
cgtttaggcatgtttaacatccagcactgtaagaagctgtccagctgggtgctgctgatgaaatacctgggcaatgccaccgccatcttcttcctgcctgwtgaggggaaactacagcacctggaaaatgaactcacccacgatatcatcaccaagttcctggaaaatgaagacagaaggtctgccagcttacatttaccc

SEQ ID NO: 5042 - DNA, 201 bp, Homo sapiens
accaaggctgacactcacgatgaaatcctggagggcctgaatttcaacctcacggagattccggaggctcagatccatgaaggcttccaggaactcctccrtaccctcaaccagccagacagccagctccagctgaccaccggcaatggcctgttcctcagcgagggcctgaagctagtggataagtttttggaggatgtt

SEQ ID NO: 5043 - DNA, 201 bp, Homo sapiens; identical to SEQ ID NO: 4992

SEQ ID NO: 5044 - DNA, 201 bp, Homo sapiens; identical to SEQ ID NO: 4993

SEQ ID NO: 5045 - DNA, 201 bp, Homo sapiens; identical to SEQ ID NO: 4994

SEQ ID NO: 5046 - DNA, 201 bp, Homo sapiens; identical to SEQ ID NO: 4995

SEQ ID NO: 5047 - DNA, 201 bp, Homo sapiens; identical to SEQ ID NO: 4996

SEQ ID NO: 5048 - DNA, 201 bp, Homo sapiens; identical to SEQ ID NO: 4997

SEQ ID NO: 5049 - DNA, 201 bp, Homo sapiens; identical to SEQ ID NO: 4998

SEQ ID NO: 5050 - DNA, 201 bp, Homo sapiens; identical to SEQ ID NO: 4999

SEQ ID NO: 5051 - DNA, 201 bp, Homo sapiens; identical to SEQ ID NO: 5000

SEQ ID NO: 5052 - DNA, 201 bp, Homo sapiens; identical to SEQ ID NO: 5001

SEQ ID NO: 5053 - DNA, 201 bp, Homo sapiens; identical to SEQ ID NO: 5002

SEQ ID NO: 5054 - DNA, 201 bp, Homo sapiens; identical to SEQ ID NO: 5003

SEQ ID NO: 5055 - DNA, 201 bp, Homo sapiens; identical to SEQ ID NO: 5004

SEQ ID NO: 5056 - DNA, 201 bp, Homo sapiens; identical to SEQ ID NO: 5005

SEQ ID NO: 5057 - DNA, 201 bp, Homo sapiens; identical to SEQ ID NO: 5006

SEQ ID NO: 5058 - DNA, 201 bp, Homo sapiens; identical to SEQ ID NO: 5007

SEQ ID NO: 5059 - DNA, 201 bp, Homo sapiens; identical to SEQ ID NO: 5008

SEQ ID NO: 5060 - DNA, 201 bp, Homo sapiens; identical to SEQ ID NO: 5009

SEQ ID NO: 5061 - DNA, 201 bp, Homo sapiens; identical to SEQ ID NO: 5010

SEQ ID NO: 5062 - DNA, 201 bp, Homo sapiens; identical to SEQ ID NO: 5011

SEQ ID NO: 5063 - DNA, 201 bp, Homo sapiens; identical to SEQ ID NO: 5012

SEQ ID NO: 5064 - DNA, 201 bp, Homo sapiens; identical to SEQ ID NO: 5013

SEQ ID NO: 5065 - DNA, 201 bp, Homo sapiens; identical to SEQ ID NO: 5014

SEQ ID NO: 5066 - DNA, 201 bp, Homo sapiens; identical to SEQ ID NO: 5015

SEQ ID NO: 5067 - DNA, 201 bp, Homo sapiens; identical to SEQ ID NO: 5016

SEQ ID NO: 5068 - DNA, 201 bp, Homo sapiens; identical to SEQ ID NO: 5018

SEQ ID NO: 5069 - DNA, 201 bp, Homo sapiens; identical to SEQ ID NO: 5019

SEQ ID NO: 5070 - DNA, 201 bp, Homo sapiens; identical to SEQ ID NO: 5020

SEQ ID NO: 5071 - DNA, 201 bp, Homo sapiens; identical to SEQ ID NO: 5021

SEQ ID NO: 5072 - DNA, 201 bp, Homo sapiens; identical to SEQ ID NO: 5022

SEQ ID NO: 5073 - DNA, 201 bp, Homo sapiens; identical to SEQ ID NO: 5023

SEQ ID NO: 5074 - DNA, 201 bp, Homo sapiens; identical to SEQ ID NO: 5024

SEQ ID NO: 5075 - DNA, 201 bp, Homo sapiens; identical to SEQ ID NO: 5025

SEQ ID NO: 5076 - DNA, 201 bp, Homo sapiens; identical to SEQ ID NO: 5026

SEQ ID NO: 5077 - DNA, 201 bp, Homo sapiens; identical to SEQ ID NO: 5027

SEQ ID NO: 5078 - DNA, 201 bp, Homo sapiens; identical to SEQ ID NO: 5028

SEQ ID NO: 5079 - DNA, 201 bp, Homo sapiens; identical to SEQ ID NO: 5029

SEQ ID NO: 5080 - DNA, 201 bp, Homo sapiens; identical to SEQ ID NO: 5030

SEQ ID NO: 5081 - DNA, 201 bp, Homo sapiens; identical to SEQ ID NO: 5031

SEQ ID NO: 5082 - DNA, 201 bp, Homo sapiens; identical to SEQ ID NO: 5032

SEQ ID NO: 5083 - DNA, 201 bp, Homo sapiens
ctcctgccagccttcaggccactctcctgtgcctgccagaagagacagagcttgaggagagcttgaggagagcaggaaaggacaatgccgtcttctgtctygtggggcatcctcctgctggcaggcctgtgctgcctggtccctgtctccctggctgaggatccccagggagatgctgcccagaagacagatacatcccac

SEQ ID NO: 5084 - DNA, 201 bp, Homo sapiens; identical to SEQ ID NO: 5034

SEQ ID NO: 5085 - DNA, 201 bp, Homo sapiens; identical to SEQ ID NO: 5035

SEQ ID NO: 5086 - DNA, 201 bp, Homo sapiens; identical to SEQ ID NO: 5036

SEQ ID NO: 5087 - DNA, 201 bp, Homo sapiens; identical to SEQ ID NO: 5037

SEQ ID NO: 5088 - DNA, 201 bp, Homo sapiens; identical to SEQ ID NO: 5038

SEQ ID NO: 5089 - DNA, 201 bp, Homo sapiens; identical to SEQ ID NO: 5039

SEQ ID NO: 5090 - DNA, 201 bp, Homo sapiens; identical to SEQ ID NO: 5040

SEQ ID NO: 5091 - DNA, 201 bp, Homo sapiens; identical to SEQ ID NO: 5041

SEQ ID NO: 5092 - DNA, 201 bp, Homo sapiens; identical to SEQ ID NO: 5042

SEQ ID NO: 5093 - DNA, 201 bp, Homo sapiens; identical to SEQ ID NO: 4992

SEQ ID NO: 5094 - DNA, 201 bp, Homo sapiens
ctcctcagcttcaggcaccaccactgacctgggacagtgaatctgttactgatgtcggcaagtacttggcacaggctggtttaataatccctaggcacttycacgtggtgtcaatccctgatcactgggagtcatcatgtgccttgactcggggcctggcccccccatctctgtcttgcaggacaatgccgtcttctgtct

SEQ ID NO: 5095 - DNA, 201 bp, Homo sapiens; identical to SEQ ID NO: 4993

SEQ ID NO: 5096 - DNA, 201 bp, Homo sapiens; identical to SEQ ID NO: 4994

SEQ ID NO: 5097 - DNA, 201 bp, Homo sapiens; identical to SEQ ID NO: 4995

SEQ ID NO: 5098 - DNA, 201 bp, Homo sapiens; identical to SEQ ID NO: 4996

SEQ ID NO: 5099 - DNA, 201 bp, Homo sapiens; identical to SEQ ID NO: 4997

SEQ ID NO: 5100 - DNA, 201 bp, Homo sapiens; identical to SEQ ID NO: 4998

SEQ ID NO: 5101 - DNA, 201 bp, Homo sapiens; identical to SEQ ID NO: 4999

SEQ ID NO: 5102 - DNA, 201 bp, Homo sapiens; identical to SEQ ID NO: 5000

SEQ ID NO: 5103 - DNA, 201 bp, Homo sapiens; identical to SEQ ID NO: 5001

SEQ ID NO: 5104 - DNA, 201 bp, Homo sapiens; identical to SEQ ID NO: 5003

SEQ ID NO: 5105 - DNA, 201 bp, Homo sapiens; identical to SEQ ID NO: 5004

SEQ ID NO: 5106 - DNA, 201 bp, Homo sapiens; identical to SEQ ID NO: 5005

SEQ ID NO: 5107 - DNA, 201 bp, Homo sapiens; identical to SEQ ID NO: 5006

SEQ ID NO: 5108 - DNA, 201 bp, Homo sapiens; identical to SEQ ID NO: 5007

SEQ ID NO: 5109 - DNA, 201 bp, Homo sapiens; identical to SEQ ID NO: 5008

SEQ ID NO: 5110 - DNA, 201 bp, Homo sapiens; identical to SEQ ID NO: 5010

SEQ ID NO: 5111 - DNA, 201 bp, Homo sapiens; identical to SEQ ID NO: 5011

SEQ ID NO: 5112 - DNA, 201 bp, Homo sapiens; identical to SEQ ID NO: 5012

SEQ ID NO: 5113 - DNA, 201 bp, Homo sapiens; identical to SEQ ID NO: 5013

SEQ ID NO: 5114 - DNA, 201 bp, Homo sapiens; identical to SEQ ID NO: 5014

SEQ ID NO: 5115 - DNA, 201 bp, Homo sapiens; identical to SEQ ID NO: 5015

SEQ ID NO: 5116 - DNA, 201 bp, Homo sapiens; identical to SEQ ID NO: 5016

SEQ ID NO: 5117 - DNA, 201 bp, Homo sapiens
tgtctcctcagcttcaggcaccaccactgacctgggacagtgaatctgttactgatgtcggcaagtacttggcacaggctggtttaataatccctaggcayttccacgtggtgtcaatccctgatcactgggagtcatcatgtgccttgactcggggcctggcccccccatctctgtcttgcaggacaatgccgtcttctg

SEQ ID NO: 5118 - DNA, 201 bp, Homo sapiens; identical to SEQ ID NO: 5018

SEQ ID NO: 5119 - DNA, 201 bp, Homo sapiens; identical to SEQ ID NO: 5019

SEQ ID NO: 5120 - DNA, 201 bp, Homo sapiens; identical to SEQ ID NO: 5020

SEQ ID NO: 5121 - DNA, 201 bp, Homo sapiens; identical to SEQ ID NO: 5021

SEQ ID NO: 5122 - DNA, 201 bp, Homo sapiens; identical to SEQ ID NO: 5022

SEQ ID NO: 5123 - DNA, 201 bp, Homo sapiens; identical to SEQ ID NO: 5023

SEQ ID NO: 5124 - DNA, 201 bp, Homo sapiens; identical to SEQ ID NO: 5024

SEQ ID NO: 5125 - DNA, 201 bp, Homo sapiens; identical to SEQ ID NO: 5025

SEQ ID NO: 5126 - DNA, 201 bp, Homo sapiens; identical to SEQ ID NO: 5026

SEQ ID NO: 5127 - DNA, 201 bp, Homo sapiens; identical to SEQ ID NO: 5027

SEQ ID NO: 5128 - DNA, 201 bp, Homo sapiens; identical to SEQ ID NO: 5028

SEQ ID NO: 5129 - DNA, 201 bp, Homo sapiens; identical to SEQ ID NO: 5029

SEQ ID NO: 5130 - DNA, 201 bp, Homo sapiens; identical to SEQ ID NO: 5030

SEQ ID NO: 5131 - DNA, 201 bp, Homo sapiens; identical to SEQ ID NO: 5031

SEQ ID NO: 5132 - DNA, 201 bp, Homo sapiens; identical to SEQ ID NO: 5032

SEQ ID NO: 5133 - DNA, 201 bp, Homo sapiens
cacgtggtgtcaatccctgatcactgggagtcatcatgtgccttgactcggggcctggcccccccatctctgtcttgcaggacaatgccgtcttctgtctygtggggcatcctcctgctggcaggcctgtgctgcctggtccctgtctccctggctgaggatccccagggagatgctgcccagaagacagatacatcccac

SEQ ID NO: 5134 - DNA, 201 bp, Homo sapiens; identical to SEQ ID NO: 5034

SEQ ID NO: 5135 - DNA, 201 bp, Homo sapiens; identical to SEQ ID NO: 5035

SEQ ID NO: 5136 - DNA, 201 bp, Homo sapiens; identical to SEQ ID NO: 5036

SEQ ID NO: 5137 - DNA, 201 bp, Homo sapiens; identical to SEQ ID NO: 5037

SEQ ID NO: 5138 - DNA, 201 bp, Homo sapiens; identical to SEQ ID NO: 5038

SEQ ID NO: 5139 - DNA, 201 bp, Homo sapiens; identical to SEQ ID NO: 5039

SEQ ID NO: 5140 - DNA, 201 bp, Homo sapiens; identical to SEQ ID NO: 5040

SEQ ID NO: 5141 - DNA, 201 bp, Homo sapiens; identical to SEQ ID NO: 5041

SEQ ID NO: 5142 - DNA, 201 bp, Homo sapiens; identical to SEQ ID NO: 5042

SEQ ID NO: 5143 - DNA, 201 bp, Homo sapiens; identical to SEQ ID NO: 4992

SEQ ID NO: 5144 - DNA, 201 bp, Homo sapiens; identical to SEQ ID NO: 4993

SEQ ID NO: 5145 - DNA, 201 bp, Homo sapiens; identical to SEQ ID NO: 4994

SEQ ID NO: 5146 - DNA, 201 bp, Homo sapiens; identical to SEQ ID NO: 4995

SEQ ID NO: 5147 - DNA, 201 bp, Homo sapiens; identical to SEQ ID NO: 4996

SEQ ID NO: 5148 - DNA, 201 bp, Homo sapiens; identical to SEQ ID NO: 4997

SEQ ID NO: 5149 - DNA, 201 bp, Homo sapiens; identical to SEQ ID NO: 4998

SEQ ID NO: 5150 - DNA, 201 bp, Homo sapiens; identical to SEQ ID NO: 4999

SEQ ID NO: 5151 - DNA, 201 bp, Homo sapiens; identical to SEQ ID NO: 5000

SEQ ID NO: 5152 - DNA, 201 bp, Homo sapiens; identical to SEQ ID NO: 5001

SEQ ID NO: 5153 - DNA, 201 bp, Homo sapiens; identical to SEQ ID NO: 5003

SEQ ID NO: 5154 - DNA, 201 bp, Homo sapiens; identical to SEQ ID NO: 5004

SEQ ID NO: 5155 - DNA, 201 bp, Homo sapiens; identical to SEQ ID NO: 5005

SEQ ID NO: 5156 - DNA, 201 bp, Homo sapiens; identical to SEQ ID NO: 5006

SEQ ID NO: 5157 - DNA, 201 bp, Homo sapiens; identical to SEQ ID NO: 5007

SEQ ID NO: 5158 - DNA, 201 bp, Homo sapiens; identical to SEQ ID NO: 5008

SEQ ID NO: 5159 - DNA, 201 bp, Homo sapiens; identical to SEQ ID NO: 5010

SEQ ID NO: 5160 - DNA, 201 bp, Homo sapiens; identical to SEQ ID NO: 5011

SEQ ID NO: 5161 - DNA, 201 bp, Homo sapiens; identical to SEQ ID NO: 5012

SEQ ID NO: 5162 - DNA, 201 bp, Homo sapiens; identical to SEQ ID NO: 5013

SEQ ID NO: 5163 - DNA, 201 bp, Homo sapiens; identical to SEQ ID NO: 5014

SEQ ID NO: 5164 - DNA, 201 bp, Homo sapiens; identical to SEQ ID NO: 5015

SEQ ID NO: 5165 - DNA, 201 bp, Homo sapiens; identical to SEQ ID NO: 5016

SEQ ID NO: 5166 - DNA, 201 bp, Homo sapiens; identical to SEQ ID NO: 5018

SEQ ID NO: 5167 - DNA, 201 bp, Homo sapiens; identical to SEQ ID NO: 5019

SEQ ID NO: 5168 - DNA, 201 bp, Homo sapiens; identical to SEQ ID NO: 5020

SEQ ID NO: 5169 - DNA, 201 bp, Homo sapiens; identical to SEQ ID NO: 5021

SEQ ID NO: 5170 - DNA, 201 bp, Homo sapiens; identical to SEQ ID NO: 5022

SEQ ID NO: 5171 - DNA, 201 bp, Homo sapiens; identical to SEQ ID NO: 5023

SEQ ID NO: 5172 - DNA, 201 bp, Homo sapiens; identical to SEQ ID NO: 5024

SEQ ID NO: 5173 - DNA, 201 bp, Homo sapiens; identical to SEQ ID NO: 5025

SEQ ID NO: 5174 - DNA, 201 bp, Homo sapiens; identical to SEQ ID NO: 5026

SEQ ID NO: 5175 - DNA, 201 bp, Homo sapiens; identical to SEQ ID NO: 5027

SEQ ID NO: 5176 - DNA, 201 bp, Homo sapiens; identical to SEQ ID NO: 5028

SEQ ID NO: 5177 - DNA, 201 bp, Homo sapiens; identical to SEQ ID NO: 5029

SEQ ID NO: 5178 - DNA, 201 bp, Homo sapiens; identical to SEQ ID NO: 5030

SEQ ID NO: 5179 - DNA, 201 bp, Homo sapiens; identical to SEQ ID NO: 5031

SEQ ID NO: 5180 - DNA, 201 bp, Homo sapiens; identical to SEQ ID NO: 5032

SEQ ID NO: 5181 - DNA, 201 bp, Homo sapiens
ttcaaggagagatgagcgtctctaaagcccctgacagcaagagcccagaactgggacaccattagtgacccagacggcaggacaatgccgtcttctgtctygtggggcatcctcctgctggcaggcctgtgctgcctggtccctgtctccctggctgaggatccccagggagatgctgcccagaagacagatacatcccac

SEQ ID NO: 5182 - DNA, 201 bp, Homo sapiens; identical to SEQ ID NO: 5034

SEQ ID NO: 5183 - DNA, 201 bp, Homo sapiens; identical to SEQ ID NO: 5035

SEQ ID NO: 5184 - DNA, 201 bp, Homo sapiens; identical to SEQ ID NO: 5036

SEQ ID NO: 5185 - DNA, 201 bp, Homo sapiens; identical to SEQ ID NO: 5037

SEQ ID NO: 5186 - DNA, 201 bp, Homo sapiens; identical to SEQ ID NO: 5038

SEQ ID NO: 5187 - DNA, 201 bp, Homo sapiens; identical to SEQ ID NO: 5039

SEQ ID NO: 5188 - DNA, 201 bp, Homo sapiens; identical to SEQ ID NO: 5040

SEQ ID NO: 5189 - DNA, 201 bp, Homo sapiens; identical to SEQ ID NO: 5041

SEQ ID NO: 5190 - DNA, 201 bp, Homo sapiens; identical to SEQ ID NO: 5042

SEQ ID NO: 5191 - DNA, 201 bp, Homo sapiens; identical to SEQ ID NO: 4992

SEQ ID NO: 5192 - DNA, 201 bp, Homo sapiens; identical to SEQ ID NO: 4993

SEQ ID NO: 5193 - DNA, 201 bp, Homo sapiens; identical to SEQ ID NO: 4994

SEQ ID NO: 5194 - DNA, 201 bp, Homo sapiens; identical to SEQ ID NO: 4995

SEQ ID NO: 5195 - DNA, 201 bp, Homo sapiens; identical to SEQ ID NO: 4996

SEQ ID NO: 5196 - DNA, 201 bp, Homo sapiens; identical to SEQ ID NO: 4997

SEQ ID NO: 5197 - DNA, 201 bp, Homo sapiens; identical to SEQ ID NO: 4998

SEQ ID NO: 5198 - DNA, 201 bp, Homo sapiens; identical to SEQ ID NO: 4999

SEQ ID NO: 5199 - DNA, 201 bp, Homo sapiens; identical to SEQ ID NO: 5000

SEQ ID NO: 5200 - DNA, 201 bp, Homo sapiens; identical to SEQ ID NO: 5001

SEQ ID NO: 5201 - DNA, 201 bp, Homo sapiens; identical to SEQ ID NO: 5003

SEQ ID NO: 5202 - DNA, 201 bp, Homo sapiens; identical to SEQ ID NO: 5004

SEQ ID NO: 5203 - DNA, 201 bp, Homo sapiens; identical to SEQ ID NO: 5005

SEQ ID NO: 5204 - DNA, 201 bp, Homo sapiens; identical to SEQ ID NO: 5006

SEQ ID NO: 5205 - DNA, 201 bp, Homo sapiens; identical to SEQ ID NO: 5007

SEQ ID NO: 5206 - DNA, 201 bp, Homo sapiens; identical to SEQ ID NO: 5008

SEQ ID NO: 5207 - DNA, 201 bp, Homo sapiens; identical to SEQ ID NO: 5010

SEQ ID NO: 5208 - DNA, 201 bp, Homo sapiens; identical to SEQ ID NO: 5011

SEQ ID NO: 5209 - DNA, 201 bp, Homo sapiens; identical to SEQ ID NO: 5012

SEQ ID NO: 5210 - DNA, 201 bp, Homo sapiens; identical to SEQ ID NO: 5013

SEQ ID NO: 5211 - DNA, 201 bp, Homo sapiens; identical to SEQ ID NO: 5014

SEQ ID NO: 5212 - DNA, 201 bp, Homo sapiens; identical to SEQ ID NO: 5015

SEQ ID NO: 5213 - DNA, 201 bp, Homo sapiens; identical to SEQ ID NO: 5016

SEQ ID NO: 5214 - DNA, 201 bp, Homo sapiens; identical to SEQ ID NO: 5018

SEQ ID NO: 5215 - DNA, 201 bp, Homo sapiens; identical to SEQ ID NO: 5019

SEQ ID NO: 5216 - DNA, 201 bp, Homo sapiens; identical to SEQ ID NO: 5020

SEQ ID NO: 5217 - DNA, 201 bp, Homo sapiens; identical to SEQ ID NO: 5021

SEQ ID NO: 5218 - DNA, 201 bp, Homo sapiens; identical to SEQ ID NO: 5022

SEQ ID NO: 5219 - DNA, 201 bp, Homo sapiens; identical to SEQ ID NO: 5023

SEQ ID NO: 5220 - DNA, 201 bp, Homo sapiens; identical to SEQ ID NO: 5024

SEQ ID NO: 5221 - DNA, 201 bp, Homo sapiens; identical to SEQ ID NO: 5025

SEQ ID NO: 5222 - DNA, 201 bp, Homo sapiens; identical to SEQ ID NO: 5026

SEQ ID NO: 5223 - DNA, 201 bp, Homo sapiens; identical to SEQ ID NO: 5027

SEQ ID NO: 5224 - DNA, 201 bp, Homo sapiens; identical to SEQ ID NO: 5028

SEQ ID NO: 5225 - DNA, 201 bp, Homo sapiens; identical to SEQ ID NO: 5029

SEQ ID NO: 5226 - DNA, 201 bp, Homo sapiens; identical to SEQ ID NO: 5030

SEQ ID NO: 5227 - DNA, 201 bp, Homo sapiens; identical to SEQ ID NO: 5031

SEQ ID NO: 5228 - DNA, 201 bp, Homo sapiens; identical to SEQ ID NO: 5032

SEQ ID NO: 5229 - DNA, 201 bp, Homo sapiens; identical to SEQ ID NO: 5033

SEQ ID NO: 5230 - DNA, 201 bp, Homo sapiens; identical to SEQ ID NO: 5034

SEQ ID NO: 5231 - DNA, 201 bp, Homo sapiens; identical to SEQ ID NO: 5035

SEQ ID NO: 5232 - DNA, 201 bp, Homo sapiens; identical to SEQ ID NO: 5036

SEQ ID NO: 5233 - DNA, 201 bp, Homo sapiens; identical to SEQ ID NO: 5037

SEQ ID NO: 5234 - DNA, 201 bp, Homo sapiens; identical to SEQ ID NO: 5038

SEQ ID NO: 5235 - DNA, 201 bp, Homo sapiens; identical to SEQ ID NO: 5039

SEQ ID NO: 5236 - DNA, 201 bp, Homo sapiens; identical to SEQ ID NO: 5040

SEQ ID NO: 5237 - DNA, 201 bp, Homo sapiens; identical to SEQ ID NO: 5041

SEQ ID NO: 5238 - DNA, 201 bp, Homo sapiens; identical to SEQ ID NO: 5042

SEQ ID NO: 5239 - DNA, 201 bp, Homo sapiens; identical to SEQ ID NO: 4992

SEQ ID NO: 5240 - DNA, 201 bp, Homo sapiens; identical to SEQ ID NO: 4993

SEQ ID NO: 5241 - DNA, 201 bp, Homo sapiens; identical to SEQ ID NO: 4994

SEQ ID NO: 5242 - DNA, 201 bp, Homo sapiens; identical to SEQ ID NO: 4995

SEQ ID NO: 5243 - DNA, 201 bp, Homo sapiens; identical to SEQ ID NO: 4996

SEQ ID NO: 5244 - DNA, 201 bp, Homo sapiens; identical to SEQ ID NO: 4997

SEQ ID NO: 5245 - DNA, 201 bp, Homo sapiens; identical to SEQ ID NO: 4998

SEQ ID NO: 5246 - DNA, 201 bp, Homo sapiens; identical to SEQ ID NO: 4999

SEQ ID NO: 5247 - DNA, 201 bp, Homo sapiens; identical to SEQ ID NO: 5000

SEQ ID NO: 5248 - DNA, 201 bp, Homo sapiens; identical to SEQ ID NO: 5001

SEQ ID NO: 5249 - DNA, 201 bp, Homo sapiens; identical to SEQ ID NO: 5002

SEQ ID NO: 5250 - DNA, 201 bp, Homo sapiens; identical to SEQ ID NO: 5003

SEQ ID NO: 5251 - DNA, 201 bp, Homo sapiens; identical to SEQ ID NO: 5004

SEQ ID NO: 5252 - DNA, 201 bp, Homo sapiens; identical to SEQ ID NO: 5005

SEQ ID NO: 5253 - DNA, 201 bp, Homo sapiens; identical to SEQ ID NO: 5006

SEQ ID NO: 5254 - DNA, 201 bp, Homo sapiens; identical to SEQ ID NO: 5007

SEQ ID NO: 5255 - DNA, 201 bp, Homo sapiens; identical to SEQ ID NO: 5008

SEQ ID NO: 5256 - DNA, 201 bp, Homo sapiens; identical to SEQ ID NO: 5009

SEQ ID NO: 5257 - DNA, 201 bp, Homo sapiens; identical to SEQ ID NO: 5010

SEQ ID NO: 5258 - DNA, 201 bp, Homo sapiens; identical to SEQ ID NO: 5011

SEQ ID NO: 5259 - DNA, 201 bp, Homo sapiens; identical to SEQ ID NO: 5012

SEQ ID NO: 5260 - DNA, 201 bp, Homo sapiens; identical to SEQ ID NO: 5013

SEQ ID NO: 5261 - DNA, 201 bp, Homo sapiens; identical to SEQ ID NO: 5014

SEQ ID NO: 5262 - DNA, 201 bp, Homo sapiens; identical to SEQ ID NO: 5015

SEQ ID NO: 5263 - DNA, 201 bp, Homo sapiens; identical to SEQ ID NO: 5016

SEQ ID NO: 5264 - DNA, 201 bp, Homo sapiens
tgactcagtaaatggtagatcttgctaccagtggaacagccactaaggattctgcagtgagagcagagggccagctaagtggtactctcccagagactgtstgactcacgccaccccctccaccttggacacaggacgctgtggtttctgagccaggtacaatgactcctttcgcagcctcccccgttgcccctctggatc

SEQ ID NO: 5265 - DNA, 201 bp, Homo sapiens; identical to SEQ ID NO: 5018

SEQ ID NO: 5266 - DNA, 201 bp, Homo sapiens; identical to SEQ ID NO: 5019

SEQ ID NO: 5267 - DNA, 201 bp, Homo sapiens; identical to SEQ ID NO: 5020

SEQ ID NO: 5268 - DNA, 201 bp, Homo sapiens; identical to SEQ ID NO: 5021

SEQ ID NO: 5269 - DNA, 201 bp, Homo sapiens; identical to SEQ ID NO: 5022

SEQ ID NO: 5270 - DNA, 201 bp, Homo sapiens; identical to SEQ ID NO: 5023

SEQ ID NO: 5271 - DNA, 201 bp, Homo sapiens; identical to SEQ ID NO: 5024

SEQ ID NO: 5272 - DNA, 201 bp, Homo sapiens; identical to SEQ ID NO: 5025

SEQ ID NO: 5273 - DNA, 201 bp, Homo sapiens; identical to SEQ ID NO: 5026

SEQ ID NO: 5274 - DNA, 201 bp, Homo sapiens; identical to SEQ ID NO: 5027

SEQ ID NO: 5275 - DNA, 201 bp, Homo sapiens; identical to SEQ ID NO: 5028

SEQ ID NO: 5276 - DNA, 201 bp, Homo sapiens; identical to SEQ ID NO: 5029

SEQ ID NO: 5277 - DNA, 201 bp, Homo sapiens; identical to SEQ ID NO: 5030

SEQ ID NO: 5278 - DNA, 201 bp, Homo sapiens; identical to SEQ ID NO: 5031

SEQ ID NO: 5279 - DNA, 201 bp, Homo sapiens; identical to SEQ ID NO: 5032

SEQ ID NO: 5280 - DNA, 201 bp, Homo sapiens; identical to SEQ ID NO: 5033

SEQ ID NO: 5281 - DNA, 201 bp, Homo sapiens; identical to SEQ ID NO: 5034

SEQ ID NO: 5282 - DNA, 201 bp, Homo sapiens; identical to SEQ ID NO: 5035

SEQ ID NO: 5283 - DNA, 201 bp, Homo sapiens; identical to SEQ ID NO: 5036

SEQ ID NO: 5284 - DNA, 201 bp, Homo sapiens; identical to SEQ ID NO: 5037

SEQ ID NO: 5285 - DNA, 201 bp, Homo sapiens; identical to SEQ ID NO: 5038

SEQ ID NO: 5286 - DNA, 201 bp, Homo sapiens; identical to SEQ ID NO: 5039

SEQ ID NO: 5287 - DNA, 201 bp, Homo sapiens; identical to SEQ ID NO: 5040

SEQ ID NO: 5288 - DNA, 201 bp, Homo sapiens; identical to SEQ ID NO: 5041

SEQ ID NO: 5289 - DNA, 201 bp, Homo sapiens; identical to SEQ ID NO: 5042

SEQ ID NO: 5290 - DNA, 201 bp, Homo sapiens; identical to SEQ ID NO: 4992

SEQ ID NO: 5291 - DNA, 201 bp, Homo sapiens; identical to SEQ ID NO: 4993

SEQ ID NO: 5292 - DNA, 201 bp, Homo sapiens; identical to SEQ ID NO: 4994

SEQ ID NO: 5293 - DNA, 201 bp, Homo sapiens; identical to SEQ ID NO: 4995

SEQ ID NO: 5294 - DNA, 201 bp, Homo sapiens; identical to SEQ ID NO: 4996

SEQ ID NO: 5295 - DNA, 201 bp, Homo sapiens; identical to SEQ ID NO: 4997

SEQ ID NO: 5296 - DNA, 201 bp, Homo sapiens; identical to SEQ ID NO: 4998

SEQ ID NO: 5297 - DNA, 201 bp, Homo sapiens; identical to SEQ ID NO: 4999

SEQ ID NO: 5298 - DNA, 201 bp, Homo sapiens; identical to SEQ ID NO: 5000

SEQ ID NO: 5299 - DNA, 201 bp, Homo sapiens; identical to SEQ ID NO: 5001

SEQ ID NO: 5300 - DNA, 201 bp, Homo sapiens; identical to SEQ ID NO: 5002

SEQ ID NO: 5301 - DNA, 201 bp, Homo sapiens; identical to SEQ ID NO: 5003

SEQ ID NO: 5302 - DNA, 201 bp, Homo sapiens; identical to SEQ ID NO: 5004

SEQ ID NO: 5303 - DNA, 201 bp, Homo sapiens; identical to SEQ ID NO: 5005

SEQ ID NO: 5304 - DNA, 201 bp, Homo sapiens; identical to SEQ ID NO: 5006

SEQ ID NO: 5305 - DNA, 201 bp, Homo sapiens; identical to SEQ ID NO: 5007

SEQ ID NO: 5306 - DNA, 201 bp, Homo sapiens; identical to SEQ ID NO: 5008

SEQ ID NO: 5307 - DNA, 201 bp, Homo sapiens; identical to SEQ ID NO: 5009

SEQ ID NO: 5308 - DNA, 201 bp, Homo sapiens; identical to SEQ ID NO: 5010

SEQ ID NO: 5309 - DNA, 201 bp, Homo sapiens; identical to SEQ ID NO: 5011

SEQ ID NO: 5310 - DNA, 201 bp, Homo sapiens; identical to SEQ ID NO: 5012

SEQ ID NO: 5311 - DNA, 201 bp, Homo sapiens; identical to SEQ ID NO: 5013

SEQ ID NO: 5312 - DNA, 201 bp, Homo sapiens; identical to SEQ ID NO: 5014

SEQ ID NO: 5313 - DNA, 201 bp, Homo sapiens; identical to SEQ ID NO: 5015

SEQ ID NO: 5314 - DNA, 201 bp, Homo sapiens; identical to SEQ ID NO: 5016

SEQ ID NO: 5315 - DNA, 201 bp, Homo sapiens; identical to SEQ ID NO: 5018

SEQ ID NO: 5316 - DNA, 201 bp, Homo sapiens; identical to SEQ ID NO: 5019

SEQ ID NO: 5317 - DNA, 201 bp, Homo sapiens; identical to SEQ ID NO: 5020

SEQ ID NO: 5318 - DNA, 201 bp, Homo sapiens; identical to SEQ ID NO: 5021

SEQ ID NO: 5319 - DNA, 201 bp, Homo sapiens; identical to SEQ ID NO: 5022

SEQ ID NO: 5320 - DNA, 201 bp, Homo sapiens; identical to SEQ ID NO: 5023

SEQ ID NO: 5321 - DNA, 201 bp, Homo sapiens; identical to SEQ ID NO: 5024

SEQ ID NO: 5322 - DNA, 201 bp, Homo sapiens; identical to SEQ ID NO: 5025

SEQ ID NO: 5323 - DNA, 201 bp, Homo sapiens; identical to SEQ ID NO: 5026

SEQ ID NO: 5324 - DNA, 201 bp, Homo sapiens; identical to SEQ ID NO: 5027

SEQ ID NO: 5325 - DNA, 201 bp, Homo sapiens; identical to SEQ ID NO: 5028

SEQ ID NO: 5326 - DNA, 201 bp, Homo sapiens; identical to SEQ ID NO: 5029

SEQ ID NO: 5327 - DNA, 201 bp, Homo sapiens; identical to SEQ ID NO: 5030

SEQ ID NO: 5328 - DNA, 201 bp, Homo sapiens; identical to SEQ ID NO: 5031

SEQ ID NO: 5329 - DNA, 201 bp, Homo sapiens; identical to SEQ ID NO: 5032

SEQ ID NO: 5330 - DNA, 201 bp, Homo sapiens; identical to SEQ ID NO: 5033

SEQ ID NO: 5331 - DNA, 201 bp, Homo sapiens; identical to SEQ ID NO: 5034

SEQ ID NO: 5332 - DNA, 201 bp, Homo sapiens; identical to SEQ ID NO: 5035

SEQ ID NO: 5333 - DNA, 201 bp, Homo sapiens; identical to SEQ ID NO: 5036

SEQ ID NO: 5334 - DNA, 201 bp, Homo sapiens; identical to SEQ ID NO: 5037

SEQ ID NO: 5335 - DNA, 201 bp, Homo sapiens; identical to SEQ ID NO: 5038

SEQ ID NO: 5336 - DNA, 201 bp, Homo sapiens; identical to SEQ ID NO: 5039

SEQ ID NO: 5337 - DNA, 201 bp, Homo sapiens; identical to SEQ ID NO: 5040

SEQ ID NO: 5338 - DNA, 201 bp, Homo sapiens; identical to SEQ ID NO: 5041

SEQ ID NO: 5339 - DNA, 201 bp, Homo sapiens; identical to SEQ ID NO: 5042

SEQ ID NO: 5340 - DNA, 201 bp, Homo sapiens
ctctcttacagctgttgccagtatctaacgtggtgagcgtaatggtgctcacagttctgtgcaatgttgcagaaaagggtcctgcttactgccagcggctrtggccagggcccctgcttcccgccttgctgcacacactagccttttctgacactgaagtagtaggccagagtttggagctgctgcatctgctgttcctgt

SEQ ID NO: 5341 - DNA, 201 bp, Homo sapiens
aggagagagagggggctctggtcagccttcgtcgaggcttgcagcaccctgaaacacagcaaaccttcatccggctggagggcagcatgcggaccctggtygggctcctgaccagcaaccaggccctgctgcagcttgaggcggctcggtgcctgcatgagctctctcactccgagcagtccactgttgctgaggcctgcc

SEQ ID NO: 5342 - DNA, 201 bp, Homo sapiens
tttgggtcccagctcctccccttccactcagcactatccaggcaggaggaccaaaagggactcagtgtggtctacttactctggggccctagaatccctgmccccccgccacccttcatgtttgcttcagcagctggtagcttttgatgagacagaataaagttttatttttatattaagctactttgcctcagtggttgc

SEQ ID NO: 5343 - DNA, 201 bp, Homo sapiens
atcatctgcagccaggtcagcaatcctctgctcattggccatggggctctgtctactctggggttgctgctgttggacttggctggggctgtccagaaaascgaggatgcaggactggagctgctggcatgccccgtgcttcgatgtctaagcaacctgctaactgaggcagcagtggagactgtgggagggcaaatgcag

SEQ ID NO: 5344 - DNA, 172 bp, Homo sapiens
cgccctccccgcctgttcccgccctgtgctgaggctgcgcagtcggtgccatcttctacgcccctgggagcrttgtggctgctgtttccttcggctttcctcctcctgctccaccatgtggagccgacggcagggccgcctcaggcccacggtctgcggggtggaggagcta

SEQ ID NO: 5345 - DNA, 201 bp, Homo sapiens
tcctgcggcaagcccagcgggggacagaggaaaaggagagagagggggctctggtcagccttcgtcgaggcttgcagcaccctgaaacacagcaaaccttsatccggctggagggcagcatgcggaccctggtcgggctcctgaccagcaaccaggccctgctgcagcttgaggcggctcggtgcctgcatgagctctctc

SEQ ID NO: 5346 - DNA, 201 bp, Homo sapiens
tctgtgcaatgttgcagaaaagggtcctgcttactgccagcggctgtggccagggcccctgcttcccgccttgctgcacacactagccttttctgacactraagtagtaggccagagtttggagctgctgcatctgctgttcctgtatcagccagaggctgttcaggtcttcctgcagcagtcagggctgcaagccctgga

SEQ ID NO: 5347 - DNA, 201 bp, Homo sapiens
ggctgcgatcctcggggaaaccgaggtgcagcagttcctgcggcaagcccagcgggggacagaggaaaaggagagagagggggctctggtcagccttcgtsgaggcttgcagcaccctgaaacacagcaaaccttcatccggctggagggcagcatgcggaccctggtcgggctcctgaccagcaaccaggccctgctgca

SEQ ID NO: 5348 - DNA, 201 bp, Homo sapiens
gttgcaacctggcccaaagctcaaccctggggtcgctgtggagtttgcctggtgccttcattacatcatctgcagccaggtcagcaatcctctgctcattrgccatggggctctgtctactctggggttgctgctgttggacttggctggggctgtccagaaaaccgaggatgcaggactggagctgctggcatgccccgt

SEQ ID NO: 5349 - DNA, 201 bp, Homo sapiens; identical to SEQ ID NO: 5340

SEQ ID NO: 5350 - DNA, 201 bp, Homo sapiens; identical to SEQ ID NO: 5341

SEQ ID NO: 5351 - DNA, 201 bp, Homo sapiens; identical to SEQ ID NO: 5342

SEQ ID NO: 5352 - DNA, 201 bp, Homo sapiens; identical to SEQ ID NO: 5343

SEQ ID NO: 5353 - DNA, 146 bp, Homo sapiens
tgctgaggctgcgcagtcggtgccatcttctacgcccctgggagcrttgtggctgctgtttccttcggctttcctcctcctgctccaccatgtggagccgacggcagggccgcctcaggcccacggtctgcggggtggaggagcta

SEQ ID NO: 5354 - DNA, 201 bp, Homo sapiens; identical to SEQ ID NO: 5345

SEQ ID NO: 5355 - DNA, 201 bp, Homo sapiens; identical to SEQ ID NO: 5346

SEQ ID NO: 5356 - DNA, 201 bp, Homo sapiens
ctctcactccgagcagtccactgttgctgaggcctgcctgccagccacttcttacctcctcacctacctctccagtcacagctcagacttcatacctggcwtgaaacaggccaagcccagtgcttttgttgcctgttctcaggagctgtgtctgtatacactgggtaacctgatcgtggagagtgaggctgtgagaaggca

SEQ ID NO: 5357 - DNA, 201 bp, Homo sapiens; identical to SEQ ID NO: 5347

SEQ ID NO: 5358 - DNA, 201 bp, Homo sapiens
tatacactgggtaacctgatcgtggagagtgaggctgtgagaaggcagctcctgccacagggcattgttccagccttggctgcctgcatccagggtttggyaagaaccactggcatcttcgtggttcctacttacagccctgcttctgccagcagctccatcttggcctccactctccctcagcacatgctacaaatgttg

SEQ ID NO: 5359 - DNA, 201 bp, Homo sapiens; identical to SEQ ID NO: 5348

SEQ ID NO: 5360 - DNA, 201 bp, Homo sapiens; identical to SEQ ID NO: 5346

SEQ ID NO: 5361 - DNA, 201 bp, Homo sapiens; identical to SEQ ID NO: 5340

SEQ ID NO: 5362 - DNA, 201 bp, Homo sapiens; identical to SEQ ID NO: 5342

SEQ ID NO: 5363 - DNA, 201 bp, Homo sapiens; identical to SEQ ID NO: 5343

SEQ ID NO: 5364 - DNA, 201 bp, Homo sapiens; identical to SEQ ID NO: 5348

SEQ ID NO: 5365 - DNA, 201 bp, Homo sapiens
gttaaagcagttcgtaagaaggcaacaagttcttctcctctacagaaggattttgcaaacaattcggcaagttccaaatgattctgatcgcaaatacctgraagattgggcaagagaagaattcagaagaaacaaaagtgccaccgaagaggcttcgcccacgactgaagcgcaagacctgaaggaggcaaacggcattgt

SEQ ID NO: 5366 - DNA, 201 bp, Homo sapiens
cagaaggattttgcaaacaattcggcaagttccaaatgattctgatcgcaaatacctgaaagattgggcaagagaagaattcagaagaaacaaaagtgccmccgaagaggcttcgcccacgactgaagcgcaagacctgaaggaggcaaacggcattgttacaaccactggtgtgcgcagcatctgtgtgagagaattctc

SEQ ID NO: 5367 - DNA, 133 bp, Homo sapiens
gcgcgctgaggctccggcggacctctggtggayatggctgcttcccgcttacccccagcgacgctaacgttaaagcagttcgtaagaaggcaacaagttcttctcctctacagaaggattttgcaaacaattc

SEQ ID NO: 5368 - DNA, 201 bp, Homo sapiens
attttccaaatggtcaacagtttaaacatttaagcttgcactgagaaaccttgccacatttcagcagttttgttttgcttttggtggagagcacctgatckcgactttacagccaatgtatttactctaaattacacttttatagatacaaggtaaagtgtagctgggtgaaggcactcaggagccataaaatgtggtcaa

SEQ ID NO: 5369 - DNA, 201 bp, Homo sapiens
tgtaatcccagtactttaggaggctgctagtctcaaactcctgggctcaagcaatccacctgcctcggtggccagagtgctaggattacaggtgtgagttktttttttttttaaagagacagtcttacctcattctgtcacccagaatggaatgactttctaaaattgcagaaagcagaacatattccttgctgtttataa

SEQ ID NO: 5370 - DNA, 201 bp, Homo sapiens
ctggacacaatcattagggaagtgtaaatcaaaactactatgaggtcgggtgtagtggctcatgcttgtaatcccagtactttaggaggctgctagtctcraactcctgggctcaagcaatccacctgcctcggtggccagagtgctaggattacaggtgtgagttgtttttttttttaaagagacagtcttacctcattc

SEQ ID NO: 5371 - DNA, 201 bp, Homo sapiens
gaagtgtaaatcaaaactactatgaggtcgggtgtagtggctcatgcttgtaatcccagtactttaggaggctgctagtctcaaactcctgggctcaagcratccacctgcctcggtggccagagtgctaggattacaggtgtgagttgtttttttttttaaagagacagtcttacctcattctgtcacccagaatggaat

SEQ ID NO: 5372 - DNA, 201 bp, Homo sapiens
gatacaatccggatgatgattactcaaggcaatatgcagctcaaggagttagaaaaaacacttgctttagcaaaatcttaactatagcattattctgaagrattttcaaagtctccatgtgttttgttgcatttaggattaacaatggacaacacaaagcccagtcttactatttatatgtacagtatttggtgatagaga

SEQ ID NO: 5373 - DNA, 201 bp, Homo sapiens
gttaaagcagttcgtaagaaggcaacaagttcttctcctctacagaaggattttgcaaacaattcggcaagttccaaatgattctgatcgcaaatacctgraagattgggcaagagaagaattcagaagaaacaaaagtgccaccgaagaggatacaatccggatgatgattactcaaggcaatatgcagctcaaggagtt

SEQ ID NO: 5374 - DNA, 201 bp, Homo sapiens
cagaaggattttgcaaacaattcggcaagttccaaatgattctgatcgcaaatacctgaaagattgggcaagagaagaattcagaagaaacaaaagtgccmccgaagaggatacaatccggatgatgattactcaaggcaatatgcagctcaaggagttagaaaaaacacttgctttagcaaaatcttaactatagcatta

SEQ ID NO: 5375 - DNA, 201 bp, Homo sapiens
aggctgctagtctcaaactcctgggctcaagcaatccacctgcctcggtggccagagtgctaggattacaggtgtgagttgtttttttttttaaagagacagtcttacctcattctgtcacccagaatggaatgactttctaaaattgcagaaagcagaacatattccttgctgtttataatattatagtcgtatcaaagg

SEQ ID NO: 5376 - DNA, 201 bp, Homo sapiens
gaggctgctagtctcaaactcctgggctcaagcaatccacctgcctcggtggccagagtgctaggattacaggtgtgagttgtttttttttttaaagagacagtcttacctcattctgtcacccagaatggaatgactttctaaaattgcagaaagcagaacatattccttgctgtttataatattatagtcgtatcaaag

SEQ ID NO: 5377 - DNA, 133 bp, Homo sapiens; identical to SEQ ID NO: 5367

SEQ ID NO: 5378 - DNA, 201 bp, Homo sapiens; identical to SEQ ID NO: 5373

SEQ ID NO: 5379 - DNA, 201 bp, Homo sapiens; identical to SEQ ID NO: 5374

SEQ ID NO: 5380 - DNA, 133 bp, Homo sapiens; identical to SEQ ID NO: 5367

SEQ ID NO: 5381 - DNA, 201 bp, Homo sapiens
atgaggtcgggtgtagtggctcatgcttgtaatcccagtactttaggaggctgtggtaggtggatcacttgaggtcaggagttcaagaccagcctggccarcatggtgaaacctcatctctactaaaaatacaaaaattagcttggtgtggtggtgcattgcctgtagtcccagctacttgggaggctgaggcaggagaat

SEQ ID NO: 5382 - DNA, 201 bp, Homo sapiens; identical to SEQ ID NO: 5372

SEQ ID NO: 5383 - DNA, 201 bp, Homo sapiens
aaggatgtgagtgaccagatcggaaatgaagaacaggtggaagatacatttcagaagggtcaagaaaaagacaaagaggatcctgattcaaaatctgataytaagggcgaggataatgccattgagatgtcggaagattttgatgggaaaatgcatgatggggagcttgaagaacaagaagaggatgatgagaaatcagat

SEQ ID NO: 5384 - DNA, 201 bp, Homo sapiens
atgagagggactatgatgaaaatgaggtggacccttaccatggcaatcaggaaaaggtgccagaacccgaggctttggaccttccagatgacttgaacctygacagtgaagacaagaatggtggtgaggacaccgacaatgaagaaggagaagaagagaatcctttggagataaaagaaaaaccagaagaagcaggtcatg

SEQ ID NO: 5385 - DNA, 201 bp, Homo sapiens
aacatcagttcagaaactgcacaactcctcctggtagtctctgatgggcgaggccttttccttgagggcaaagaaagagtcctggcagcagttcaggctgyccggaatgcaaatatctttgtcatctttgttgtattggacaatcccagttcacgggattctatcttggacattaaagtaccgatatttaaaggacctgga

SEQ ID NO: 5386 - DNA, 201 bp, Homo sapiens
gcaagtgggtcgagtgcggcttctacggaaacaaagtgaggctgttcacctacagagggagaagttcactttcgctgctacacggccgtcctctgttctcrtcgagcagcttgcagtgtgtgtcagcaaaggggagcctgtgttgctggtgggagagaccgggactggcaaaacctctaccatccaatacttggctcacat

SEQ ID NO: 5387 - DNA, 201 bp, Homo sapiens
gagcagtggatcatcctcaggaacctcctcagctgtgtgcaagagattcacagcaggctgatggggccccaggcctaccccgtggccttcccccctcaggrtggcgtgcagcagtggacagagcgcctgcagcacctggccatgcagtgccagatcctgcttgagcagctctcctggctcctccagtgctgccccagtgta

SEQ ID NO: 5388 - DNA, 201 bp, Homo sapiens
tgaactgtcttccattcagaatctgaacagggcactgagggagaccctgttagcccaaccagcagctgggcaggccacaattccagagtggtgtcagggckctgctccttccggcttggaaggggagcttctgcgtcgcttgccaaagctcaggaaacgcatgaggaagatgtgcctgacgttcatgaaggagagccccct

SEQ ID NO: 5389 - DNA, 201 bp, Homo sapiens
cacccttgggctttgatgagatggaagtggagatccaaactgttaaaacagaggaagaccaagaccccagaacagacaaagcccataaggagacagaaaakgagaaaccagaaagaagccgagagtctaccattcatacagctcatcaattcctcatggacacgatcttccagccctttttaaaagatgtcaatgagctaa

SEQ ID NO: 5390 - DNA, 201 bp, Homo sapiens
gatgaagatgctcgtccgacagcggcgctccctgaccacgctcagtgagcagtggatcatcctcaggaacctcctcagctgtgtgcaagagattcacagcrggctgatggggccccaggcctaccccgtggccttcccccctcaggatggcgtgcagcagtggacagagcgcctgcagcacctggccatgcagtgccagat

SEQ ID NO: 5391 - DNA, 201 bp, Homo sapiens
tgtcaacacattgtccctggcaatgtcaagagtctgctgaagcagcctattccagagccaaaaggaggtcggcttatccaggttgaaggctactggattgyggtgggagacaaggagcctacaatagatgagacgtacattctgacatcttctgtgaagctgaacctgagagatatagtccgagttgtctctgcaggaacc

SEQ ID NO: 5392 - DNA, 201 bp, Homo sapiens
gtacaccttctatccagatgccgtgagcccactgcaggcatccatattgcagttacaacatggcatgaggctggtggcctctgagctccacacctcactcyacagcagtatggttggtgcagacaggctggggaccctggccacagccttgctggctttcccatcggtgggccccaccttcccgacttactatgctcatgc

SEQ ID NO: 5393 - DNA, 201 bp, Homo sapiens
tctttagcaactcaccgtagtactgcaaagctgctctctgtgcttgcccaggtctttacagagcttgcccagaagggattttgcttgcccaaagaatttayggaagattcagctggagagggagcaactgagttccatgactatgagggaggtggaattggagaaggcgagggcatgaaggatgtgagtgaccagatcgga

SEQ ID NO: 5394 - DNA, 201 bp, Homo sapiens
atgttcctggagagtttgtgtggcagcctggcaccctgacacaggcagccacaatgggccactggatccttctggaggatattgactatgcccccttagaygtggtttctgtgctgatccctctcttggagaatggagagctcttgattcctggccgaggtgactgtctgaaagtggcacctggatttcagttttttgcaa

SEQ ID NO: 5395 - DNA, 201 bp, Homo sapiens
aatatgtaagaggagaaattagtaaagccatggctgactttactacctggaagacccatctgcttacttcagatagccaaggaggaaatcaaatgttggaygaaggatttgtggaagatttttcagagcaaatggaaattgccatccgagccatcctctgtgccatccagaacttagaagaaagaaagaatgaaaaagcag

SEQ ID NO: 5396 - DNA, 201 bp, Homo sapiens
atgctttggcggtacaaagtgacagctgattttatggcacaagcttgtctcagaagatgcagcaaaaatcaacaaccccagataaatgaggagataagtcmcctcatctcattttgtctttatcacacacctgttacacctcaagagcttcgagatctgtggtccttgctgcatcatcagaaggtgtctcctgaagaaatt

SEQ ID NO: 5397 - DNA, 201 bp, Homo sapiens
gactttggaaaaaaggagctgtctcctgccttaagaaaccggtttacagaaatatggtgccctcaaagcacaagccgtgaagatttaattcagatcatcartcataatcttcgtccaggattgtgtctgggcagaatagatcctaaagggtctgacatacctgaagtgatgctggatttcattgactggctgacccaccaa

SEQ ID NO: 5398 - DNA, 201 bp, Homo sapiens
ggtcaatcttgctgctttttttgaactttgtgatgcactagtcctgctctgggtacagtcctcccagggaatggtgtctgatgccagtgccaatgagatcktaggttctctgcggtggcgggaccggttctggactgtggccgacacagtaaaagtagatgccccaggtctggcccttcttgccctccattggcactgggt

SEQ ID NO: 5399 - DNA, 201 bp, Homo sapiens
ttgtttagttcatttttttttttcttaacagtcaaggggaagagtgattcctcacactgctttcaagctggactgagccagtctcattctgggaaagaaaygctgtgtccagaactcagcagctccatctattttttccagtcgaaagaaactgatctttaggcagtttttacttggccagaaagcagtgctgaatacttg

SEQ ID NO: 5400 - DNA, 201 bp, Homo sapiens
aagtcacctcatctcattttgtctttatcacacacctgttacacctcaagagcttcgagatctgtggtccttgctgcatcatcagaaggtgtctcctgaaraaattacatctttgtggtccgagttatttaattccatgtttatgtctttctggagcagtactgtgaccacaaatccagagtactggctaatgtggaaccc

SEQ ID NO: 5401 - DNA, 201 bp, Homo sapiens
attcgtagtttcccactttccagtcccatctcaaagttcctgaatggcttagagatccttctggcaaaggcacaggattgggaggaaaatgcaagtcgagstttgtctttgcggaaacatcttgatttgatcagtcagatgatcattcggtggcgtaaactggagctgaactgctggtccatgagtttggataatactatg

SEQ ID NO: 5402 - DNA, 201 bp, Homo sapiens
agtgtcttggagaaggtggtaaagctatcacgatggagattgtcaacaaactagaagcagtgttattgcttatgcagcgactcaacaataaaatcaactcmtactgcaaggcagagtttgccaaacttgttgaagagttccgaagctttggtgtgaagcttacgcagttggccagtggccatagccatggcacatttgaat

SEQ ID NO: 5403 - DNA, 201 bp, Homo sapiens
aagctgacgtcgacaaaattagacagcagtcttgtgagactctctttcattcttggaaagattttgaagtttgctcttctgcgctgagttgcttgtcccargtgtcagttcatttgcagggcctagagtccttgttcattcttccagggatggaggttgagcaaagagactcacaaatggcactagttgaaagtctggaat

SEQ ID NO: 5404 - DNA, 201 bp, Homo sapiens
ccttgcaaaaattggtttgtcgtatcgcaaaggtcttgcttgggcccgttcaaaaaaccctcaagagatgcttcatcttcacccattagatctccagagcrcattgtccatcgtcagcagcactcaggaggctgattctaggctgcttacagaaatctcgtcttcatgggatggatgccagaagtatttttatcgctctct

SEQ ID NO: 5405 - DNA, 201 bp, Homo sapiens
ttaataatcacgaacacacggatattcaggagtacattggttgttacacgtctgactcctcagggaagcttgtctttaaggaaggtgttcttattgatgcyatgagaaaaggctattggattattttagatgaattaaatttggcccctactgatgtgttagaggcgctgaataggctgttggatgataaccgtgaattgc

SEQ ID NO: 5406 - DNA, 119 bp, Homo sapiens
ttgcatttatgtccatggtaggctgagctataatatgctggctttgcagcagaatgaaaaggatgagttggtgtagccttataaggaggcttataaaaatwaattatcctccataaatg

SEQ ID NO: 5407 - DNA, 201 bp, Homo sapiens
ccccttagacgtggtttctgtgctgatccctctcttggagaatggagagctcttgattcctggccgaggtgactgtctgaaagtggcacctggatttcagktttttgcaaccaggagactcttgagctgtggaggaaattggtatcgaccgctaaacagtcatgctactttgctagacaaatattggaccaaaattcacct

SEQ ID NO: 5408 - DNA, 201 bp, Homo sapiens
cttacagggacatcttgtttcgtctgacctctcccctagggtgacagctgtttgtggtgtggtgctgcctgggcagctgccagcccctggagagctgggtrgtaataggagttcttcacgtgaacaggagctggcccttaggtcttatgtgctggttgagtctgtctgcaaaagtcttcagaccctggctatggcggttgc

SEQ ID NO: 5409 - DNA, 201 bp, Homo sapiens
agaaatcagatagtgagggcggagacctggataaacacatgggcgatctcaatggtgaggaagctgacaaactagatgagaggctttggggtgatgatgakgaggaggaagatgaggaggaagaagacaataaaactgaagaaacaggaccaggaatggatgaggaagattctgaacttgttgctaaagatgacaacttgg

SEQ ID NO: 5410 - DNA, 201 bp, Homo sapiens
taaaagatgtcaatgagctaagacaggagctggagagacagctggaaatgtggcagccacgtgaatctggaaacccagaggaggagaaggttgcagctgaratgtggcagagttacctgatcttaacagcgcctctttcacaacggttatgtgaagagcttcgtctcatattagagcctacccaggcagccaagctgaaag

SEQ ID NO: 5411 - DNA, 201 bp, Homo sapiens
aaaaattgtgtcctcaatctcttttctccaaagaaaatgttctaaaattgctgggtaaattgtctactcagatatccacattggagtgtaactttggccayatcgtgtggactgagggcatgcggagactcgcgatgctagtgggaagggcattggaatttggtgaacctgtgctgctggttggagacactgggtgtggga

SEQ ID NO: 5412 - DNA, 201 bp, Homo sapiens
aaccaaatacaacagatgaatttgtgatccctctggatccccgatggaatatgcaggctctggacatgattagaaatttgatggactttgacccacaaacrgaccagcctgaccagctctttgcccttttagaatcagctgcaaacaagacaatcatatatcttgaccgggaaaaacgggtttttactgaagcaaatttgg

SEQ ID NO: 5413 - DNA, 201 bp, Homo sapiens
gagcagtactgtgaccacaaatccagagtactggctaatgtggaaccctttgcctggtatgcagcagagggaggcacccaagtctgttttggactccacaytgaagggccccggcaatctcaatagacccatattctctaagtgctgctttgaagtcttaaccagcagctggagagcaagtccctgggatgtgagtggcct

SEQ ID NO: 5414 - DNA, 201 bp, Homo sapiens
agaagatgcagcaaaaatcaacaaccccagataaatgaggagataagtcacctcatctcattttgtctttatcacacacctgttacacctcaagagcttcragatctgtggtccttgctgcatcatcagaaggtgtctcctgaagaaattacatctttgtggtccgagttatttaattccatgtttatgtctttctggagc

SEQ ID NO: 5415 - DNA, 201 bp, Homo sapiens
tgtcatcccagctgcagactggaagagacctggaagatgaagtcgttgtcagctactctcatcctcacgtcaggctgcttcgccaaaggatggatcggctsgataatttaacctgtcacctgttgaagaaacaggcctttagaccccagctgcctgcctacgagtccctggttcaggagatccaccactacgtcaccagca

SEQ ID NO: 5416 - DNA, 201 bp, Homo sapiens
gcgctcccacgtgttatgcaagggagagttggaccagagggccctgcagctcttcagacatgtgtgtcaggaaatcatcagtgagtgggatgagcaggaasgcatagcccaagagaaggctgagcaggaaagcggcctgtatagatacaggagcaggaactctaggacagccctgagtgaagaggaggaggaagaacggga

SEQ ID NO: 5417 - DNA, 201 bp, Homo sapiens
aggggaagagtgattcctcacactgctttcaagctggactgagccagtctcattctgggaaagaaacgctgtgtccagaactcagcagctccatctatttwttccagtcgaaagaaactgatctttaggcagtttttacttggccagaaagcagtgctgaatacttgaaactgtgtgctctgttctacttaatgttctgtc

SEQ ID NO: 5418 - DNA, 201 bp, Homo sapiens
gaaatgctctaaccctcctggaagtgggtcagattgcagtgtgtagttttggagaatctgtaaagctgttacacccatttcatgagcagttcagtgattaytctgggtcccagattctacgtctctgcaaattccaacaaaagaaaaccaagattgctcagtttctagagtctgttgccaacatgtttgcagctgctcagc

SEQ ID NO: 5419 - DNA, 201 bp, Homo sapiens
tggacacaggagctgatgaccaagatggagatgctgctcagcatcctgaagaacactctgaggagcagcagcagtctgtggaggaaaaagacaaggaagcygatgaagaaggtggagagaatggccctgctgaccaaggtttccagccccaggaggaagaagaacgggaggactctgatacagaggagcaggtgccagagg

SEQ ID NO: 5420 - DNA, 201 bp, Homo sapiens; identical to SEQ ID NO: 5407

SEQ ID NO: 5421 - DNA, 201 bp, Homo sapiens
tgtcaacacattgtccctggcaatgtcaagagtctgctgaagcagcctattccagagccaaaaggaggtcggcttatccaggttgaaggctactggattgyggtgggagacaaggagcctacaatagatgagacgtacattctgacatcttctgtgaagctgaacctgagagatatagtccgagttgtctctgcagggtgt

SEQ ID NO: 5422 - DNA, 201 bp, Homo sapiens; identical to SEQ ID NO: 5408

SEQ ID NO: 5423 - DNA, 201 bp, Homo sapiens
atagatgagacgtacattctgacatcttctgtgaagctgaacctgagagatatagtccgagttgtctctgcagggtgtgtgggcttttttctcgctgcccygaacttgatacaggcataggcattgatgacattttggtctaacttccttaactttcaaagagctttattcttattcattggccaactgaacaattactta

SEQ ID NO: 5424 - DNA, 201 bp, Homo sapiens; identical to SEQ ID NO: 5394

SEQ ID NO: 5425 - DNA, 201 bp, Homo sapiens; identical to SEQ ID NO: 5386

SEQ ID NO: 5426 - DNA, 201 bp, Homo sapiens
tataactttttcctggtagaaaactttgtttctagttgtgcaactttggagggagcactatggatgcagatgattttatctatctttaaagttatcttttkttattttgctgataaataccacagattattcagtaaatggctaaaagttctacttacagtttcttacaaatgttgccagcatagttggaattgctttcct

SEQ ID NO: 5427 - DNA, 201 bp, Homo sapiens
aactttttcctggtagaaaactttgtttctagttgtgcaactttggagggagcactatggatgcagatgattttatctatctttaaagttatcttttgttwttttgctgataaataccacagattattcagtaaatggctaaaagttctacttacagtttcttacaaatgttgccagcatagttggaattgctttccttag

SEQ ID NO: 5428 - DNA, 201 bp, Homo sapiens
acaaccctgatacacaccatgcttgctgtggagctgaacagctgtcaatggaagaaccggattgtggcctgccaggctttctcccggatcagtggaaatgyctgcttggatatgaaacataagttgatccagctgatgtggaatgactggaataaggaagtgaggagagcagctgcacaggcgcttgggcaaatgagcctc

SEQ ID NO: 5429 - DNA, 201 bp, Homo sapiens
tgaggacactgaggaacagtcttatatcctcctgagctatctgagtgagaagacaaccctgatacacaccatgcttgctgtggagctgaacagctgtcaakggaagaaccggattgtggcctgccaggctttctcccggatcagtggaaatgtctgcttggatatgaaacataagttgatccagctgatgtggaatgactg

SEQ ID NO: 5430 - DNA, 201 bp, Homo sapiens
aacataagttgatccagctgatgtggaatgactggaataaggaagtgaggagagcagctgcacaggcgcttgggcaaatgagcctcgggaaagaggtgcaygacataatcagggtcaagctaggtcaaggaaattcccaggagcgtgtggaagctctctacctgataggtgagctcaagcttatgaccgccaagcttctcc

SEQ ID NO: 5431 - DNA, 179 bp, Homo sapiens
aagcttgccgtagcatcctagccctgaaacttcaaggggaccgggtcagggacaccttcctagacgtgctgctcctggagaaccacgatgctgttctaaargaaatgtaccagacaatgaagatactcaacttaggaaatgaaggaaaccaagaaatgcttcaggagatcaagaacagg

SEQ ID NO: 5432 - DNA, 201 bp, Homo sapiens
ctccaccagctgtttacaaagaagaatgaggacactgaggaacagtcttatatcctcctgagctatctgagtgagaagacaaccctgatacacaccatgcwtgctgtggagctgaacagctgtcaatggaagaaccggattgtggcctgccaggctttctcccggatcagtggaaatgtctgcttggatatgaaacataag

SEQ ID NO: 5433 - DNA, 201 bp, Homo sapiens; identical to SEQ ID NO: 5430

SEQ ID NO: 5434 - DNA, 201 bp, Homo sapiens
ctccctagtttccggcttctcttcctaaggagggtctgcggcccgtctgcaccaccctctccccacagtcccgttttcctgtccatgcttggatggatccrgccgagccgtcagccgcagctgcgcgctgctcccccgactcgcaccccctcggcgaagcgctgcattttatgtaattttctgccgggctgctggcttgtg

SEQ ID NO: 5435 - DNA, 201 bp, Homo sapiens
gcattccaggaaggcagggacaccactgagtgttactgctgtactttaggggccagagcagggcaggctggatgcgcggaggaaactcatagttaggtcaraagcctggcaagacaagggaattttctggtcgtcgtccacctctccaacctcacatcctactagtcttccaagaggattctaactgcacatgactcccta

SEQ ID NO: 5436 - DNA, 201 bp, Homo sapiens
caacgccagcatacgaggcccccgccccaggagcgcgggtccgggcggcgttcccctctgcgggaggcgcggcgagccaatcctcactttaaaagctttcstgtcctcgaagcgaggggtcttccgtgcggggcaagacgcactggccccagacgaccggtccgtgaaatgacccttccgagcgacccggagcgggcgacc

SEQ ID NO: 5437 - DNA, 201 bp, Homo sapiens
acctctccaacctcacatcctactagtcttccaagaggattctaactgcacatgactccctagtttccggcttctcttcctaaggagggtctgcggcccgyctgcaccaccctctccccacagtcccgttttcctgtccatgcttggatggatccagccgagccgtcagccgcagctgcgcgctgctcccccgactcgcac

SEQ ID NO: 5438 - DNA, 127 bp, Homo sapiens
gctgtggctcattccttttttttttttaatctccatcacttgttagtgcttgctgaattaacagatgtaaggagttaacttactgttgcactagctcaaacatatttagattgttacctcacaaata

SEQ ID NO: 5439 - DNA, 201 bp, Homo sapiens; identical to SEQ ID NO: 5434

SEQ ID NO: 5440 - DNA, 201 bp, Homo sapiens; identical to SEQ ID NO: 5435

SEQ ID NO: 5441 - DNA, 201 bp, Homo sapiens; identical to SEQ ID NO: 5436

SEQ ID NO: 5442 - DNA, 183 bp, Homo sapiens
gctgtggctcattccttttttttttttaatctccatcacttgttagtgcttgctgaattaacagatgtaaggagttaacttamtgttgcactagctcaaacatatttagattgttacctcacaaatagctttttttttttggagacggagtctcgccttgtcgcccaggctggagtgcactgg

SEQ ID NO: 5443 - DNA, 201 bp, Homo sapiens; identical to SEQ ID NO: 5437

SEQ ID NO: 5444 - DNA, 201 bp, Homo sapiens
caccaactgcaatggcccagcccacaacaacaaactctttgctcctgtcgccttagcttctggccctgatggcagtgtgtatgttggcgacttcaattttrtaaggagaatatttccctcgggaaactccgttagtattttggaattaagcacaagtcctgctcacaaatactatctggctatggaccctgtgtctgaatc

SEQ ID NO: 5445 - DNA, 201 bp, Homo sapiens
agagtagaaagaggaaagaagtagaaaaatctactcaagagatggaattctgtgaaacctctcacactctgtgctctggctaccaaacagacatgcacagygtttctcggcatggctaccagctagagatgggatctgatgtggacacagagacagaaggtgctgcctcacctgaccatgcactaagaatgtggataaggg

SEQ ID NO: 5446 - DNA, 201 bp, Homo sapiens
caaaccctaccagcctctaccaaaagtcaagcatgaaatggatctagcttacaccagttcttctgatgagagtgaagatggaagaaaaccaagacagtcayacaactccagggagaccctgcacgagtataaccaggagctgaggatgaattacaatagccagagtagaaagaggaaagaagtagaaaaatctactcaaga

SEQ ID NO: 5447 - DNA, 201 bp, Homo sapiens
taagcagcaatggagtcctgaaaagagtgtcagcccaaggctataatctggccttaatgacctatccaggaaacacagggcttctggctaccaaaagtaaygaaaatggatggacaaccgtttatgagtatgaccccgagggacacctgaccaatgcaacgtttcccactggagaggtcagcagcttccacagtgacctgg

SEQ ID NO: 5448 - DNA, 201 bp, Homo sapiens
accatcgaaaattcacccttcgaattctttatgaccagactgggcgacccattctgtggtctcctgtaagcagatataatgaagtgaacatcacatattcrccttcgggattggtgacgtttattcaaagaggaacgtggaatgaaaaaatggaatatgaccagagtgggaaaattatttcaagaacttgggctgatggga

SEQ ID NO: 5449 - DNA, 201 bp, Homo sapiens
tccaacatgctttggccacggcacctgcatcatgggagtctgcatctgtgtgccaggatacaaaggagaaatatgcgaggaagaggactgcctagacccartgtgttccaaccatggcatctgtgtaaaaggagaatgtcactgttctactggctggggaggagttaactgtgaaacaccacttcctgtatgtcaagagca

SEQ ID NO: 5450 - DNA, 201 bp, Homo sapiens
ccttttcccgacctgcctttacctttaacaaaccttacaggtgctgcaactggaagtgcacagcattgagcgccactgcaatcacagtgactttggccttrttactagcctatgtgattgcagtgcatttgttcggcctgacttggcagttgcaaccagttgaaggagagctgtatgcaaatggagttagcaaagggaaca

SEQ ID NO: 5451 - DNA, 201 bp, Homo sapiens
ccttaatgacctatccaggaaacacagggcttctggctaccaaaagtaacgaaaatggatggacaaccgtttatgagtatgaccccgagggacacctgacmaatgcaacgtttcccactggagaggtcagcagcttccacagtgacctggagaagctgacaaaagtggagctagatacttccaaccgtgaaaatgtcctca

SEQ ID NO: 5452 - DNA, 201 bp, Homo sapiens
catcatgggagtctgcatctgtgtgccaggatacaaaggagaaatatgcgaggaagaggactgcctagacccaatgtgttccaaccatggcatctgtgtaraaggagaatgtcactgttctactggctggggaggagttaactgtgaaacaccacttcctgtatgtcaagagcagtgctcaggacacggaacttttcttct

SEQ ID NO: 5453 - DNA, 199 bp, Homo sapiens
ggggaaaagcagcagcttttgagcactgggcgggtacaaggttacgatgggtattttgttttgtctgttgagcagtatttagaactttctgacagtgccartaatattcactttatgagacagagcgaaataggcaggaggtaacaaaaatatctctgcctttgcgtcaccaaagactgcctgtttttaaaacataaaa

SEQ ID NO: 5454 - DNA, 201 bp, Homo sapiens
tctgtgaaacctctcacactctgtgctctggctaccaaacagacatgcacagcgtttctcggcatggctaccagctagagatgggatctgatgtggacacrgagacagaaggtgctgcctcacctgaccatgcactaagaatgtggataaggggaatgaaatcagagcatagttcctgtttgtccagccgggccaactctg

SEQ ID NO: 5455 - DNA, 201 bp, Homo sapiens
attgcagtgcatttgttcggcctgacttggcagttgcaaccagttgaaggagagctgtatgcaaatggagttagcaaagggaacagggggaccgagtccayggacactacttactctccaattggaggaaaagtttctgataaatcagagaaaaaagtgtttcagaagggacgggcgatagacactggagaagttgacatt

SEQ ID NO: 5456 - DNA, 201 bp, Homo sapiens
gggagatctacatcatcgctggtgcccccactgactgtgactgcaaaattgatccaaactgtgactgtttttcaggtgatggtggctatgccaaagatgcraagatgaaagccccttcctccttagcagtgtcgcctgatggaaccctctatgtggcagacctcggaaatgttcgaattcgtaccatcagcaggaaccaag

SEQ ID NO: 5457 - DNA, 201 bp, Homo sapiens
actgttgtcaacaaagcaactgttatataagtcctctctgccagggctcaccagatcctcttgacctcattcagcaaagccaaactctcttctctcagcayacttcaagacttttttatgatcgaatcaaattcctcattggcaaggacagtactcatgtcattcctcctgaggtgtcatttgacagcaggcgtgcctgtg

SEQ ID NO: 5458 - DNA, 201 bp, Homo sapiens
ataatggatgactgttcaaccaattgcaatggaaatggagagtgtatctctggccattgtcattgtttcccaggattccttggacctgactgtgctagagrttcctgccctgtgctgtgtggtgggaatggagaatacgagaaaggacactgtgtctgccggcatggctggaaggggccagagtgtgacgttccggaagaa

SEQ ID NO: 5459 - DNA, 201 bp, Homo sapiens
atcgtaggaaaggtggggaacgtggggcagacaaactatgcagcatccaaggctggagtgattgggctgacccagaccgcagcccgggagcttggacgacrtgggatccgctgtaactctgtcctcccagggttcattgcaacacccatgacacagaaagtgccacagaaagtggtggacaagattactgaaatgatcccg

SEQ ID NO: 5460 - DNA, 201 bp, Homo sapiens
ctagacgagaaaacccccacaagtatctgctctacaaaccaaccttcagccagctatataccttcttagcagcgtcttttaaggagctgcctgccaatagygtgcttctgatttacctgtcggccactggcgttttccccacaggtcgttctgatagtgaaggtccttatgattttggaggtgtacttactaatagtaacc

SEQ ID NO: 5461 - DNA, 201 bp, Homo sapiens
gcctcgaaaacggagaagcagtatcagaggttctggtgatagcagtcattcacaatctcaaggggaaagatatcaacatttcactgaaaagactgaatttrctcttaaagaaatcatgtcctctggaggtgctgaagatgatatcccacagggagagaggaaaacagttacagatttttgttatcttctggataaatctaa

SEQ ID NO: 5462 - DNA, 201 bp, Homo sapiens; identical to SEQ ID NO: 5460

SEQ ID NO: 5463 - DNA, 201 bp, Homo sapiens
aggagcccggcagccccagcagccgcggagtcgcctggcccccagactgactggcacagtggagaaaccgcctcgaaaacggagaagcaggactgaatttrctcttaaagaaatcatgtcctctggaggtgctgaagatgatatcccacagggagagaggaaaacagttacagatttttgttatcttctggataaatctaa

SEQ ID NO: 5464 - DNA, 201 bp, Homo sapiens
tggcagtgtggccctggggcctgtgtgcccaactgtatgcccacctggaggcatccaccaggttaccgtcaatgagagcctcctggcccccctcaacgtgragctggaccccgagatccagaaagtgcgtgcccaggagcgagagcagatcaaggctctgaacaacaagttcgcctccttcatcgacaaggtgcggttcct

SEQ ID NO: 5465 - DNA, 201 bp, Homo sapiens
cctcaatgtggccagtggcagcgggaagagtggaggctatggatttggccggggccgggccagtggctttgctggaagcatgtttggcagtgtggccctgrggcctgtgtgcccaactgtatgcccacctggaggcatccaccaggttaccgtcaatgagagcctcctggcccccctcaacgtggagctggaccccgagat

SEQ ID NO: 5466 - DNA, 201 bp, Homo sapiens
tctccaccctgctggtcctgctcccatacacctggcactggccttggccacccacttctcccagcctgtgtcttcctgatcctgggaaggcctggatgacmaagcttggtgaaattcctccctgtacacaccctattaactccttggctgtggtcccccagctacaccaccagcccaggtcctggctgccagctttcctcc

SEQ ID NO: 5467 - DNA, 179 bp, Homo sapiens
ccttcctccctcctgcatctgagctttgtctccaccagcaacatgagccgccaattcacctgcaagtcgggagctgccrccaaggggggcttcagtggctgctcagctgtgctctcagggggcagctcatcctccttccgggcagggagcaaagggctcagtgggggctttggcagccg

SEQ ID NO: 5468 - DNA, 201 bp, Homo sapiens
cccccctcaacgtggagctggaccccgagatccagaaagtgcgtgcccaggagcgagagcagatcaaggctctgaacaacaagttcgcctccttcatcgayaaggtgcggttcctggagcagcagaaccaggtactggagaccaagtgggagctgctgcagcagctggacctgaacaactgcaagaacaacctggagccca

SEQ ID NO: 5469 - DNA, 201 bp, Homo sapiens
cgagatcactcagatccagtcccacatcagtgacatgtctgtcatcctgtccatggacaacaaccggaacctagacctggacagcatcattgacgaagtcygcacccagtatgaggagattgccttgaagagtaaggccgaggctgaggccctgtaccagaccaagttccaagagcttcagctggcagctggcaggcatgg

SEQ ID NO: 5470 - DNA, 114 bp, Homo sapiens
ccttcctccctccygcatctgagctttgtctccaccagcaacatgagccgccaattcacctgcaagtcgggagctgccgccaaggggggcttcagtggctgctcagctgtgctc

SEQ ID NO: 5471 - DNA, 201 bp, Homo sapiens
gggccgggccagtggctttgctggaagcatgtttggcagtgtggccctggggcctgtgtgcccaactgtatgcccacctggaggcatccaccaggttaccrtcaatgagagcctcctggcccccctcaacgtggagctggaccccgagatccagaaagtgcgtgcccaggagcgagagcagatcaaggctctgaacaacaa

SEQ ID NO: 5472 - DNA, 201 bp, Homo sapiens
acctatcgcaagctactggagagcgaggagtgcaggatgtcaggagaatttccctcccctgtcagcatctccatcatcagcagcaccagtggcggcagtgkctatggcttccggcccagcatggtcagcggtggctatgtggccaacagcagcaactgcatctctggagtgtgcagcgtgagaggcggggagggcaggagc

SEQ ID NO: 5473 - DNA, 201 bp, Homo sapiens
cctggggcctgtgtgcccaactgtatgcccacctggaggcatccaccaggttaccgtcaatgagagcctcctggcccccctcaacgtggagctggaccccragatccagaaagtgcgtgcccaggagcgagagcagatcaaggctctgaacaacaagttcgcctccttcatcgacaaggtgcggttcctggagcagcagaa

SEQ ID NO: 5474 - DNA, 201 bp, Homo sapiens
gctatgtggccaacagcagcaactgcatctctggagtgtgcagcgtgagaggcggggagggcaggagccggggcagtgccaacgattacaaagacaccctrgggaagggttccagcctgagtgcaccctccaagaaaaccagtcggtagagaagactgccccgggccccgcctcattccatgacccggctctggatcccac

SEQ ID NO: 5475 - DNA, 201 bp, Homo sapiens
cctggctgccagctttcctcctctgcccggcctctagcgcagtcgctaactactctgctgggctccctgggtctctgcccaaggccccgcacacactgggrcctagcatagttcctgcctatgccaggagctggctctgtgtttaagaaaaggaggactgaaggacaaacaaccaagagtggcccagtccccacccccaca

SEQ ID NO: 5476 - DNA, 201 bp, Homo sapiens
cctgtaccagaccaagttccaagagcttcagctggcagctggcaggcatggggacgacctcaaaaacaccaagaatgaaatctcggagctcactcggctcwtccagagaatccgctcagagatcgagaacgtgaagaagcaggcttccaacctggagacagccatcgctgatgctgagcagcggggagacaacgccctgaa

SEQ ID NO: 5477 - DNA, 201 bp, Homo sapiens
gtgagaggcggggagggcaggagccggggcagtgccaacgattacaaagacaccctagggaagggttccagcctgagtgcaccctccaagaaaaccagtcrgtagagaagactgccccgggccccgcctcattccatgacccggctctggatcccacactgtacttcccacagcccactctcagctccatctccaccctgc

SEQ ID NO: 5478 - DNA, 201 bp, Homo sapiens
tcgctgatgctgagcagcggggagacaacgccctgaaggatgcccgggccaagctggacgagctggagggcgccctgcaccaggccaaggaggagctggcrcggatgctgcgcgagtaccaggagctcatgagcctgaagctggccctggacatggagatcgccacctatcgcaagctactggagagcgaggagtgcagga

SEQ ID NO: 5479 - DNA, 201 bp, Homo sapiens
cgcacagtgcgccttcgaccaagagcagccgcgagccttcaagctcacgctgcaggcccgcgaccaggactagctcgcgctcggcgtcaacgtgagcctgygcgtgttggtggacgacctgaatgacaacgcaccgcgggtgctgtaccccagctctggagcgcaatggcttcgcgctcttggatatggtgctgcacgccg

SEQ ID NO: 5480 - DNA, 201 bp, Homo sapiens
ctactcattggcgatgccaacgacaatgctctggttttctaccaggcctcctacgtcgtccacgtggccaagaacaatcttcccaaagcctccatagtgtkcaagtagacacctccaacctagacttgggacccaacagccaagttccctattccatcgtggccagtgacctggagccacaggcgctgtgattctaggtgt

SEQ ID NO: 5481 - DNA, 201 bp, Homo sapiens
ccacaatgattcccaaagattctgcaccttggacagtaatcactgtccaggatttaaatcacaagatctttaaatcacaagatctggattcgggagaaaaygaggtcacatgtctgatataagaaaatgcaccttgagaaaaatcttcctccaataattaactacatgcttgtaacaaatggggccgtggaccaggaacag

SEQ ID NO: 5482 - DNA, 201 bp, Homo sapiens
gccgaggcaggagaatcgcttgaacccgagaggcaatcgcaccactgcactccagcctgggtgacagagcaaggcgccatctcaaaaaaaatgaacaaacrgtagttgaaaattctttaaatgtttttcacattaatatggagattcaggatatgaagaatcatgcaccacggttcagcaggaatgttattaagttacgta

SEQ ID NO: 5483 - DNA, 201 bp, Homo sapiens
ggacagtaatcactgtccaggatttaaatcacaagatctttaaatcacaagatctggattcgggagaaaacgaggtcacatgtctgatataagaaaatgcrccttgagaaaaatcttcctccaataattaactacatgcttgtaacaaatggggccgtggaccaggaacagacccaaggtataacatcagcatcactgcca

SEQ ID NO: 5484 - DNA, 201 bp, Homo sapiens
gcgcgtgttggtggacgacctgaatgacaacgcaccgcgggtgctgtaccccagctctggagcgcaatggcttcgcgctcttggatatggtgctgcacgcygcggagcctggctacctggtcaccaaggtggtggctgtagacgcagatgtgagacacaatgcgtggctgtcctaccacgtgctgcaggccagcaagccca

SEQ ID NO: 5485 - DNA, 201 bp, Homo sapiens
cagtgaccaaaaaggaagaagtaaaaatagtcatggtgaaacactacagaataggtttagatgaaaaatatgaagtaacaaaaaagtggtctttgaacgawctgcagatgattgatggaaaagaagcagatactgacaatccattttttgatctgcacttcaagaaagtgtacagtttggaagcatatagctgtgcttcta

SEQ ID NO: 5486 - DNA, 101 bp, Homo sapiens
tcaatcttgtgtgcttgtccctatgtcccttgccactctgaagctgtgtaccacattccttcatcagtgacctatgaaaatggtttcccaagtaaatatts

SEQ ID NO: 5487 - DNA, 201 bp, Homo sapiens
cagtggatgcagccggagagggcctgcatacagtgaagttgttctctgaagttcctcatgtgccttaagtctggacccaccaaagaagaaaacaatgaccrctggtcccttcccggagttttctctgactgaactgctgtcacaggaagaaagactgaagcctgctcacatacctggacagattttgcaaaccgttgtctg

SEQ ID NO: 5488 - DNA, 201 bp, Homo sapiens
tgactggctctctgcctgtagccagagacccagtggatgcagccggagagggcctgcatacagtgaagttgttctctgaagttcctcatgtgccttaagtmtggacccaccaaagaagaaaacaatgaccactggtcccttcccggagttttctctgactgaactgctgtcacaggaagaaagactgaagcctgctcacat

SEQ ID NO: 5489 - DNA, 201 bp, Homo sapiens
aggggcactgctgactggctctctgcctgtagccagagacccagtggatgcagccggagagggcctgcatacagtgaagttgttctctgaagttcctcatstgccttaagtctggacccaccaaagaagaaaacaatgaccactggtcccttcccggagttttctctgactgaactgctgtcacaggaagaaagactgaag

SEQ ID NO: 5490 - DNA, 117 bp, Homo sapiens
atgaatgatcgtgaatyggggagccctcagaatcacagcagtttcagagatactccaggggtgccttgtgatcagaacgaatttatagacaaaaaaggttctacccatcacctacag

SEQ ID NO: 5491 - DNA, 201 bp, Homo sapiens
tgatcaatgatttaaaacttaattcaacaaggagagacgaatatgacaaaattcagattgccgacttgatggaagaaaagttcccaggtgatgctggtttkggcaaactgagaactcttcaaagaaataccaacactgggagaggagaccttgctgaaactcttagaaaagtcaaaagatcatctgctctgggtttagatg

SEQ ID NO: 5492 - DNA, 144 bp, Homo sapiens
attccagcaaaaggaaaaacctcatcaaagaagaggaagcagagaaaagtaggtccaactacacctttagcaaccacagacaagaagttcacagctgaagraggagaggagactcctatagctcagcgttttcacacaccatag

SEQ ID NO: 5493 - DNA, 201 bp, Homo sapiens
gatcgtgaatcggggagccctcagaatcacagcagtttcagagatactccaggggtgccttgtgatcagaacgaatttatagacaaaaaaggttctacccrtcacctacagataatggtgagtaaatacaagaacaatgttctgctgaaaggattagaagccatcaatgactatcacttcagcataattaattccttactg

SEQ ID NO: 5494 - DNA, 201 bp, Homo sapiens
ttgtgatcagaacgaatttatagacaaaaaaggttctacccatcacctacagataatggtgagtaaatacaagaacaatgttctgctgaaaggattagaarccatcaatgactatcacttcagcataattaattccttactgatcaatgatttaaaacttaattcaacaaggagagacgaatatgacaaaattcagattgc

SEQ ID NO: 5495 - DNA, 201 bp, Homo sapiens
tgttaggaatgctcccaggaggtacaaaagctatcagtcgctgcaccgaaggactctaggatgctatgacttagttttggaccatggagattgcccagcargccgagaatattccagccctccaacattgttgttaaaaagtccactgctgtatgttaggtgacttcccaaagctgctcactacttcttcttattctgttt

SEQ ID NO: 5496 - DNA, 201 bp, Homo sapiens
catggagattgcccagcaagccgagaatattccagccctccaacattgttgttaaaaagtccactgctgtatgttaggtgacttcccaaagctgctcactwcttcttcttattctgttttctcaaccccacaaaaatccaatcactgaaatcctgaactcttttgatagtggcatgagtgttaagtaaattgcacacctct

SEQ ID NO: 5497 - DNA, 201 bp, Homo sapiens
aggtgttaggaatgctcccaggaggtacaaaagctatcagtcgctgcaccgaaggactctaggatgctatgacttagttttggaccatggagattgcccarcaagccgagaatattccagccctccaacattgttgttaaaaagtccactgctgtatgttaggtgacttcccaaagctgctcactacttcttcttattctg

SEQ ID NO: 5498 - DNA, 201 bp, Homo sapiens
attgcccagcaagccgagaatattccagccctccaacattgttgttaaaaagtccactgctgtatgttaggtgacttcccaaagctgctcactacttcttmttattctgttttctcaaccccacaaaaatccaatcactgaaatcctgaactcttttgatagtggcatgagtgttaagtaaattgcacacctcttgtggaa

SEQ ID NO: 5499 - DNA, 201 bp, Homo sapiens
gggcagaaccaagaacataaaccctccaagggatctgcttgatatcccaagttggaagggaccccagatacctgtgaggactggttgtctctcttcggtgsccttgagtctctgaatttgtcgggttctcccatgatttggggtgatttctcaccctctgtccttcccccagcacaaagcactggccttgcctccaggacc

SEQ ID NO: 5500 - DNA, 201 bp, Homo sapiens
gaacataaaccctccaagggatctgcttgatatcccaagttggaagggaccccagatacctgtgaggactggttgtctctcttcggtggccttgagtctcwgaatttgtcgggttctcccatgatttggggtgatttctcaccctctgtccttcccccagcacaaagcactggccttgcctccaggaccttgcttccttct

SEQ ID NO: 5501 - DNA, 201 bp, Homo sapiens
gctgctgctacgtcttcctgccctccggtccattggccttaagtgtctagagcatctgtttttcttcaagctcattggtgacacccccatcgacaccttcytcatggagatgcttgaggctccccatcaactggcctgagctcagacccagacgtggtgcttctcacactggaggagcacacatccaagagggactccaag

SEQ ID NO: 5502 - DNA, 201 bp, Homo sapiens
agctgatggacatgagagtagggccctgacaggccttcctcctctcaaacctggcagatgggggcctctctggaagagggaggggccctgtcactgtccaragtctctttttacacttcacctccttctgcagtcagactgaaatataaaaaaggtggtggtggtggtgaaggggctggtggagatgtaggaaccgatctg

SEQ ID NO: 5503 - DNA, 201 bp, Homo sapiens
ccaagggatctgcttgatatcccaagttggaagggaccccagatacctgtgaggactggttgtctctcttcggtggccttgagtctctgaatttgtcgggktctcccatgatttggggtgatttctcaccctctgtccttcccccagcacaaagcactggccttgcctccaggaccttgcttccttctcatcttgcctcat

SEQ ID NO: 5504 - DNA, 201 bp, Homo sapiens
tgtccttcccccagcacaaagcactggccttgcctccaggaccttgcttccttctcatcttgcctcattttgcttcccatctgaagagtggaaatggggawctcccccagaggtggatactggggggcaggcctcccaagctgatggacatgagagtagggccctgacaggccttcctcctctcaaacctggcagatgggg

SEQ ID NO: 5505 - DNA, 201 bp, Homo sapiens
gccttccctttacagctctcctccagccctgggcacatagcataggctggggacacaggatcctggcctgagaattgaggggaggtggccagcccgcagargtggggtgctggggctgcatgatttttgccctgcgtcccttctctttggggctcctttcccctctcatacataaaatcgctttcaaattaaaatcgctgt

SEQ ID NO: 5506 - DNA, 201 bp, Homo sapiens
ctgatggacatgagagtagggccctgacaggccttcctcctctcaaacctggcagatgggggcctctctggaagagggaggggccctgtcactgtccagaktctctttttacacttcacctccttctgcagtcagactgaaatataaaaaaggtggtggtggtggtgaaggggctggtggagatgtaggaaccgatctgct

SEQ ID NO: 5507 - DNA, 201 bp, Homo sapiens
ccagtggtggaggtgggtgtttgggaaaggcagggccctgaaatggcctgtccctagggctctccaagcactagccttcccagcttcccgccgcccccccyatctcttcctgtctaacttggggaaggggcctgggctgtgaggacagggcccccacaggggatggtttcacgagtgtagtcccggaggccttccctttac

SEQ ID NO: 5508 - DNA, 201 bp, Homo sapiens
ttgagtgggcgaagaggatcccacacttttcctccttgcctctggatgatcaggtcatattgctgcgggcaggctggaatgaactcctcattgcctccttytcacaccgatccattgatgttcgagatggcatcctccttgccacaggtcttcacgtgcaccgcaactcagcccattcagcaggagtaggagccatctttg

SEQ ID NO: 5509 - DNA, 201 bp, Homo sapiens
cccctgaagatgtgaagccaccagtcttaggggtccggggcctgcactgtccaccccctccaggtggccctggggctggcaaacggctatgtgcaatctgyggggacagaagctcaggcaaacactacggggtttacagctgtgagggttgcaagggcttcttcaaacgcaccatccgcaaagaccttacatactcttgcc

SEQ ID NO: 5510 - DNA, 201 bp, Homo sapiens
ttggctgcctgagggcaatcattctgtttaatccagatgccaagggcctctccaaccctagtgaggtggaggtcctgcgggagaaagtgtatgcatcactkgagacctactgcaaacagaagtaccctgagcagcagggacggtttgccaagctgctgctacgtcttcctgccctccggtccattggccttaagtgtctag

SEQ ID NO: 5511 - DNA, 201 bp, Homo sapiens
tggccatagccatggctactcccatgagagcctctaccacagaggacatggacatgaccatgagcatagccatggaggctatggggagtctggggctccasgcatcaagcaggacctggatgctgtcactctctgggcttatgcactgggggccacagtgctgatctcagcagctccattttttgtcctcttccttatccc

SEQ ID NO: 5512 - DNA, 201 bp, Homo sapiens
acctcattcctcatgctcttgaacctcattctcaccacactctggagcaacccggacatggacactcccacagtggccagggccccattctgtctgtgggmctgtgggttctcagtggaattgttgcctttcttgtcgtggagaaatttgtgagacatgtgaaaggaggacatggtcacagtcatggacatggacacgctc

SEQ ID NO: 5513 - DNA, 201 bp, Homo sapiens
agtcatggacatggacacgctcacagtcatacacgtggaagtcatggacatggaagacaagagcgttctaccaaggagaagcagagctcagaggaagaagraaaggaaacaagaggggttcagaagaggcgaggagggagcacagtacccaaagatgggccagtgagacctcagaacgctgaagaagaaaaaagaggctta

SEQ ID NO: 5514 - DNA, 201 bp, Homo sapiens
tggacagagagggtaacaggaggagtcggggataaacatcaaacatcaatcgtgtgtcctgatttgggagtgattggggggatggggtgggagagggttarttggtattctcatggcctgattttttttgtttctattccttttatatcactgtgtttgaatcgagggggaggggtggtaaccggaaataaagacctccga

SEQ ID NO: 5515 - DNA, 201 bp, Homo sapiens
tggtggctggactcgggggtcatgacgacctgcacgacgatctgcaagaggacttccatggccacagccacaggcactcacatgaagatttccaccatgghcacagccatgcccatggccatggccacactcacgagagcatctggcatggacatacccacgatcacgaccatggacattcacatgaggatttacaccatg

SEQ ID NO: 5516 - DNA, 201 bp, Homo sapiens
ctgatggtctggccattggggcttcctttcgagggggccggggactagggatcctgaccacaatgactgtcctgctacatgaagtgccccacgaggtcggrgactttgccatcttggtccagtctggctgcagcaaaaagcaggcgatgcgtctgcaactactgacagcagtaggggcactggcaggcacagcctgtgccc

SEQ ID NO: 5517 - DNA, 201 bp, Homo sapiens
ggctgcagcaaaaagcaggcgatgcgtctgcaactactgacagcagtaggggcactggcaggcacagcctgtgcccttctcactgaaggaggagcagtggrcagtgaaattgcaggtggtgcaggtcctggctgggtcctgccatttactgcaggtggctttatctacgtagcaacagtgtctgtgttgcccgagctgctg

SEQ ID NO: 5518 - DNA, 201 bp, Homo sapiens
gcgattggagtaaagcggaccctgtgtaggtatagagttgagtcaagtggagtcactgcctctgtccctctggtcagcgtgatggccagaggcctgggggscccccactgggtggccgtgggactgctgacctgggcgaccttggggcttctggtggctggactcgggggtcatgacgacctgcacgacgatctgcaagag

SEQ ID NO: 5519 - DNA, 201 bp, Homo sapiens
ggggttcagaagaggcgaggagggagcacagtacccaaagatgggccagtgagacctcagaacgctgaagaagaaaaaagaggcttagacctgcgtgtgtyggggtacctgaatctggctgctgacttggcacacaacttcactgatggtctggccattggggcttcctttcgagggggccggggactagggatcctgacc

SEQ ID NO: 5520 - DNA, 201 bp, Homo sapiens
tttccaccatggccacagccatgcccatggccatggccacactcacgagagcatctggcatggacatacccacgatcacgaccatggacattcacatgagratttacaccatggccatagccatggctactcccatgagagcctctaccacagaggacatggacatgaccatgagcatagccatggaggctatggggagtc

SEQ ID NO: 5521 - DNA, 201 bp, Homo sapiens
ttcttgtcgtggagaaatttgtgagacatgtgaaaggaggacatggtcacagtcatggacatggacacgctcacagtcatacacgtggaagtcatggacayggaagacaagagcgttctaccaaggagaagcagagctcagaggaagaagaaaaggaaacaagaggggttcagaagaggcgaggagggagcacagtaccca

SEQ ID NO: 5522 - DNA, 201 bp, Homo sapiens
gtcatgacgacctgcacgacgatctgcaagaggacttccatggccacagccacaggcactcacatgaagatttccaccatggccacagccatgcccatggycatggccacactcacgagagcatctggcatggacatacccacgatcacgaccatggacattcacatgaggatttacaccatggccatagccatggctact

SEQ ID NO: 5523 - DNA, 201 bp, Homo sapiens
cttccggtgggctcctgggagatgctttcctgcacctcattcctcatgctcttgaacctcattctcaccacactctggagcaacccggacatggacactcscacagtggccagggccccattctgtctgtgggactgtgggttctcagtggaattgttgcctttcttgtcgtggagaaatttgtgagacatgtgaaaggag

SEQ ID NO: 5524 - DNA, 201 bp, Homo sapiens; identical to SEQ ID NO: 5511

SEQ ID NO: 5525 - DNA, 201 bp, Homo sapiens; identical to SEQ ID NO: 5512

SEQ ID NO: 5526 - DNA, 201 bp, Homo sapiens; identical to SEQ ID NO: 5513

SEQ ID NO: 5527 - DNA, 201 bp, Homo sapiens; identical to SEQ ID NO: 5514

SEQ ID NO: 5528 - DNA, 201 bp, Homo sapiens; identical to SEQ ID NO: 5515

SEQ ID NO: 5529 - DNA, 201 bp, Homo sapiens; identical to SEQ ID NO: 5516

SEQ ID NO: 5530 - DNA, 201 bp, Homo sapiens; identical to SEQ ID NO: 5517

SEQ ID NO: 5531 - DNA, 201 bp, Homo sapiens
acttcctgttctcgcgggatctaaaggcgggactgccacgtccaagcaaaccgggaaaggagaggatcccggagccgcgtgatggccagaggcctgggggscccccactgggtggccgtgggactgctgacctgggcgaccttggggcttctggtggctggactcgggggtcatgacgacctgcacgacgatctgcaagag

SEQ ID NO: 5532 - DNA, 201 bp, Homo sapiens; identical to SEQ ID NO: 5519

SEQ ID NO: 5533 - DNA, 201 bp, Homo sapiens; identical to SEQ ID NO: 5520

SEQ ID NO: 5534 - DNA, 201 bp, Homo sapiens; identical to SEQ ID NO: 5521

SEQ ID NO: 5535 - DNA, 165 bp, Homo sapiens
atattggtaaaggcattagggcgaaggtggaacggaacttcctgttctcgcgggatctaaaggcsggactgccacgtccaagcaaaccgggaaaggagaggatcccggagccgcgtgatggccagaggcctgggggccccccactgggtggccgtgggactgctg

SEQ ID NO: 5536 - DNA, 201 bp, Homo sapiens; identical to SEQ ID NO: 5523

SEQ ID NO: 5537 - DNA, 201 bp, Homo sapiens; identical to SEQ ID NO: 5522

SEQ ID NO: 5538 - DNA, 201 bp, Homo sapiens
aagggcaagcctccgctctcatccagcacaagcctcaccctacgcattggtgaagtcaacgacaatgctccggttttccaccaagtctcctacgtggtccmcgtggccgaaaacaaccttcccggagcctccatcccacaagtcagcgcctctgacctggacctagggctgaatggccaagtctcctactccatcgttacc

SEQ ID NO: 5539 - DNA, 201 bp, Homo sapiens
tcccggagcctccatcccacaagtcagcgcctctgacctggacctagggctgaatggccaagtctcctactccatcgttaccactgacttggagctgcggrcactgtcgtcctacgtgtccgtgagcgcacagagcggggtggtggtcgcgcagcgtgccttcgaccacgagcagctgtgcgccttcgagctcacgatgca

SEQ ID NO: 5540 - DNA, 201 bp, Homo sapiens
cctcaccctacgcattggtgaagtcaacgacaatgctccggttttccaccaagtctcctacgtggtccacgtggccgaaaacaaccttcccggagcctccmtcccacaagtcagcgcctctgacctggacctagggctgaatggccaagtctcctactccatcgttaccactgacttggagctgcgggcactgtcgtccta

SEQ ID NO: 5541 - DNA, 201 bp, Homo sapiens
cggatcccggagtacaacgtcaccatcactgccactgacaagggcaagcctccgctctcatccagcacaagcctcaccctacgcattggtgaagtcaacgrcaatgctccggttttccaccaagtctcctacgtggtccacgtggccgaaaacaaccttcccggagcctccatcccacaagtcagcgcctctgacctggac

SEQ ID NO: 5542 - DNA, 201 bp, Homo sapiens
cagacgtcctgaccatgctgcggagacatgtcactgatgggctcctgaaaggcacggacgcagcccaagccgcacagtacatggctatggaaaaggccacrgccgcagaagtcctgaagagtcaggaggaggcagcccacacctccggccagcccttccacagcacaggtgcccctggcgatgcgaagtcggaagtggtgc

SEQ ID NO: 5543 - DNA, 201 bp, Homo sapiens
ccttggtgtatatagaaaagccacggagcgctgcaggattatccagccttgtagacctcggccctcctctaatggagaagcaagtttttgcctacagcacrgcgacaatacccaaagacagagagaccagcgagaaaatgatgaaaaccacagccaacaggaaccacacagatagtgcaggaacgccccatgtgtctggtg

SEQ ID NO: 5544 - DNA, 201 bp, Homo sapiens
agccacacaagctggacagtctcctgaagcgtgtgcgcagcatgacagacgtcctgaccatgctgcggagacatgtcactgatgggctcctgaaaggcacsgacgcagcccaagccgcacagtacatggctatggaaaaggccacagccgcagaagtcctgaagagtcaggaggaggcagcccacacctccggccagccct

SEQ ID NO: 5545 - DNA, 201 bp, Homo sapiens
agatgaggcggagcgtggcggaactcaggctccagctccagcagatgcggcagctccagctgcagaaccaggagttgctgagggcaatgatgaagaaggcygagctggaaatcagtggcaaagtgatggaaacaatgaagagactggaggatcccgtgcagcgacagcgcgtcctagtggagcaagagagacaaaaatatc

SEQ ID NO: 5546 - DNA, 201 bp, Homo sapiens
agaagagatgtcaagcctgatgaagacatgagtggcaaaaacattgcaatgtacagaaatgagggtttctatgctgatccttacctttatcacgagggacrgatgagcatagcctcatcccatggtggacacccactggatgtccccgaccacatcattgcatatcaccgcaccgccatccggtcagcgagtgcttattgt

SEQ ID NO: 5547 - DNA, 201 bp, Homo sapiens
cccccctcacaccatgcagccagaccgggcctctccgagccgccaggcctttaaaaaggagccaggcaccttggtgtatatagaaaagccacggagcgctrcaggattatccagccttgtagacctcggccctcctctaatggagaagcaagtttttgcctacagcacggcgacaatacccaaagacagagagaccagcga

SEQ ID NO: 5548 - DNA, 201 bp, Homo sapiens
gagaacttgtttatgcaagaggagatggccctggggcccctcgccccggatctactgctcatccaccccatgcgattccaaattccccaccgtctactccrgtgccccattccatgcccccctccccgtccagaattccttatgggggcacccgctccatggttgttcctggcaatgccaccatccccagggacagaatct

SEQ ID NO: 5549 - DNA, 201 bp, Homo sapiens
gccctggggcccctcgccccggatctactgctcatccaccccatgcgattccaaattccccaccgtctactccagtgccccattccatgcccccctccccrtccagaattccttatgggggcacccgctccatggttgttcctggcaatgccaccatccccagggacagaatctccagcctgccagtctccagacccatct

SEQ ID NO: 5550 - DNA, 201 bp, Homo sapiens
gtggaactttcagaagattctccaaattcggaacaggacttggaaaagctggggggaaagtcgccccctcctcctccgccacctcctcgtcgaagctaccygccaggatcgggactcaccaccacgaggtcaggcgatgtggtctacaccggcagaaaggagaacatcaccgctaaggcaagcagtgaagatgctggacca

SEQ ID NO: 5551 - DNA, 201 bp, Homo sapiens
ggaagatgctcagtgctctggagtccacggtgcctcccagccagcctccacctgtgggcacctcggccatccacatgagcctgcttgagatgaggcggagygtggcggaactcaggctccagctccagcagatgcggcagctccagctgcagaaccaggagttgctgagggcaatgatgaagaaggccgagctggaaatca

SEQ ID NO: 5552 - DNA, 201 bp, Homo sapiens
atatccagcagaggagcctgcttcagcctggaccccatccccaccgcctgtcaccacctcctcctcaaaggatgaggaggaagaagaagaagaaggagacraaataatggcagaactccagggctccagcggggccccacagacgagcaggatgcctgtccccatgagtgccaagaacagacccggaaccctggacaaacc

SEQ ID NO: 5553 - DNA, 201 bp, Homo sapiens
agccgcagaagtcctgaagagtcaggaggaggcagcccacacctccggccagcccttccacagcacaggtgcccctggcgatgcgaagtcggaagtggtgmctttgtccggcatgatggttcgccacgcgcagagctcccctgtggtcatccagccctcccagcactccgtggccctgctgaaccctgctcagaacttgcc

SEQ ID NO: 5554 - DNA, 201 bp, Homo sapiens
ccagcctgccagtctccagacccatctctccaagcccaagcgccattttagaaagaagagatgtcaagcctgatgaagacatgagtggcaaaaacattgcratgtacagaaatgagggtttctatgctgatccttacctttatcacgagggacggatgagcatagcctcatcccatggtggacacccactggatgtccccg

SEQ ID NO: 5555 - DNA, 201 bp, Homo sapiens
ggaggcagcccacacctccggccagcccttccacagcacaggtgcccctggcgatgcgaagtcggaagtggtgcctttgtccggcatgatggttcgccacrcgcagagctcccctgtggtcatccagccctcccagcactccgtggccctgctgaaccctgctcagaacttgcctcacgtggccagctccccagccgtccc

SEQ ID NO: 5556 - DNA, 201 bp, Homo sapiens
acacagatagtgcaggaacgccccatgtgtctggtgggaagatgctcagtgctctggagtccacggtgcctcccagccagcctccacctgtgggcacctcrgccatccacatgagcctgcttgagatgaggcggagcgtggcggaactcaggctccagctccagcagatgcggcagctccagctgcagaaccaggagttgc

SEQ ID NO: 5557 - DNA, 201 bp, Homo sapiens
tttgcctacagcacggcgacaatacccaaagacagagagaccagcgagaaaatgatgaaaaccacagccaacaggaaccacacagatagtgcaggaacgcmccatgtgtctggtgggaagatgctcagtgctctggagtccacggtgcctcccagccagcctccacctgtgggcacctcggccatccacatgagcctgctt

SEQ ID NO: 5558 - DNA, 201 bp, Homo sapiens
ccgtcccccaggaagcaacctccactctgcagatgtcgcaggctccgcagtccccacagatacccatgaatgggtctgccatgcagagcttgttcattgargaaatccacagtgtgagtgccaagaacagggcagtgtctatcgagaaagcagaaaagaaatgggaggaaaaaaggcaaaatctggatcactataatggga

SEQ ID NO: 5559 - DNA, 201 bp, Homo sapiens; identical to SEQ ID NO: 5542

SEQ ID NO: 5560 - DNA, 201 bp, Homo sapiens
ccttggtgtatatagaaaagccacggagcgctgcaggattatccagccttgtagacctcggccctcctctaatggagaagcaagtttttgcctacagcacrgcgacaatacccaaagacagagagaccagagagaggatgcaagccatggagaaacagattgccagtttaactggccttgttcagtctgcgctttttaaag

SEQ ID NO: 5561 - DNA, 201 bp, Homo sapiens; identical to SEQ ID NO: 5544

SEQ ID NO: 5562 - DNA, 201 bp, Homo sapiens; identical to SEQ ID NO: 5545

SEQ ID NO: 5563 - DNA, 201 bp, Homo sapiens
ctttttccagaggcagccggactcgtgcgagccttcctgtggtgaggtcaaccaaccagacgaaagaaagatctctgggggttctctatctccagtatggmgatgaaaccaagcagctcaggatgccgaatgaaatcacaagtgcagacacaatccgtgctctcttcgtaagtgcctttccacagcagctcaccatgaaaa

SEQ ID NO: 5564 - DNA, 201 bp, Homo sapiens; identical to SEQ ID NO: 5546

SEQ ID NO: 5565 - DNA, 201 bp, Homo sapiens
cccccctcacaccatgcagccagaccgggcctctccgagccgccaggcctttaaaaaggagccaggcaccttggtgtatatagaaaagccacggagcgctrcaggattatccagccttgtagacctcggccctcctctaatggagaagcaagtttttgcctacagcacggcgacaatacccaaagacagagagaccagaga

SEQ ID NO: 5566 - DNA, 201 bp, Homo sapiens
ccacagcagctcaccatgaaaatgctggaatcgcccagtgtcgccatttacatcaaagatgaaagcagaaatgtctattatgaattaaatgatgtaaggarcattcaagacagatcactcctcaaagtgtacaacaaggatcctgcacatgcgtttaatcacacaccaaaaactatgaatggagacatgaggatgcagaga

SEQ ID NO: 5567 - DNA, 201 bp, Homo sapiens; identical to SEQ ID NO: 5548

SEQ ID NO: 5568 - DNA, 201 bp, Homo sapiens; identical to SEQ ID NO: 5549

SEQ ID NO: 5569 - DNA, 201 bp, Homo sapiens
aataaagggctgcatgcttattattttttgtaccttgtcactataactacttcctagtcaaagaacgaaatgtaactgttaccgagttaaatgtttttcckctttgagggatgtaaccacatccactcagaggacactacttttctgaaagctctggggtgactaatgatgagttcctaataaattaattgcaagtgtggt

SEQ ID NO: 5570 - DNA, 201 bp, Homo sapiens
ctcacagtcctcaaccacccagtctgggtgacccggtcgagcatttatcagagacgtccgctgattctttggaagccatgtctgagggggatgctccaacycctttttccagaggcagccggactcgtgcgagccttcctgtggtgaggtcaaccaaccagacgaaagaaagatctctgggggttctctatctccagtatg

SEQ ID NO: 5571 - DNA, 201 bp, Homo sapiens
caagagaggctgagagaccagacaaggagccccaaactgtctcacagtcctcaaccacccagtctgggtgacccggtcgagcatttatcagagacgtccgstgattctttggaagccatgtctgagggggatgctccaacccctttttccagaggcagccggactcgtgcgagccttcctgtggtgaggtcaaccaaccag

SEQ ID NO: 5572 - DNA, 201 bp, Homo sapiens
gattctttggaagccatgtctgagggggatgctccaacccctttttccagaggcagccggactcgtgcgagccttcctgtggtgaggtcaaccaaccagaygaaagaaagatctctgggggttctctatctccagtatggagatgaaaccaagcagctcaggatgccgaatgaaatcacaagtgcagacacaatccgtgct

SEQ ID NO: 5573 - DNA, 201 bp, Homo sapiens; identical to SEQ ID NO: 5550

SEQ ID NO: 5574 - DNA, 201 bp, Homo sapiens; identical to SEQ ID NO: 5551

SEQ ID NO: 5575 - DNA, 201 bp, Homo sapiens
atatccagcagaggagcctgcttcagcctggaccccatccccaccgcctgtcaccacctcctcctcaaaggatgaggaggaagaagaagaagaaggagacraaataatggcagaactccaggcattccagaagtgttcctttatggatgtaaattcaaacagtcatgctgagccatcccgggctgacagtcacgttaaaga

SEQ ID NO: 5576 - DNA, 201 bp, Homo sapiens; identical to SEQ ID NO: 5553

SEQ ID NO: 5577 - DNA, 201 bp, Homo sapiens
tgcttcttttctttcttttttccttccttttttttttttttttcttttttaacatgttgagattctctagttgttttctttggcgtatctaaccccttctkttgttttctgagacctggtaacccacgctcttgcattgtggattttaaaatgtatactctgtacggttctgtaaaccgaaaaacttttgtaaatatataa

SEQ ID NO: 5578 - DNA, 201 bp, Homo sapiens; identical to SEQ ID NO: 5554

SEQ ID NO: 5579 - DNA, 201 bp, Homo sapiens; identical to SEQ ID NO: 5555

SEQ ID NO: 5580 - DNA, 201 bp, Homo sapiens; identical to SEQ ID NO: 5556

SEQ ID NO: 5581 - DNA, 201 bp, Homo sapiens
ctttttaaagggcccattacaagttatagcaaagatgcgtctagcgagaaaatgatgaaaaccacagccaacaggaaccacacagatagtgcaggaacgcmccatgtgtctggtgggaagatgctcagtgctctggagtccacggtgcctcccagccagcctccacctgtgggcacctcggccatccacatgagcctgctt

SEQ ID NO: 5582 - DNA, 201 bp, Homo sapiens; identical to SEQ ID NO: 5558

SEQ ID NO: 5583 - DNA, 201 bp, Homo sapiens
gcttactaatatctggacagtgatcaatcattttagtgtctggttagctacaggcctcggtactttttattttctcaagatagccaatttttctaactctrtttttctctacctaaagtggagggttaaaaaggtggttttggtgctgcttcttgtgacttcggtcttcttgtttttaaatattgcactgataaacatcca

SEQ ID NO: 5584 - DNA, 201 bp, Homo sapiens
tgattcaagtaactttacacgattttccagtcttattgtattaaccagcactgtgttcattttcataccctttactttgtccctggcaatgtttcttctcytcatcttctccatgtggaaacatcgcaagaagatgcagcacactgtcaaaatatccggagacgccagcaccaaagcccacagaggagttaaaagtgtgat

SEQ ID NO: 5585 - DNA, 171 bp, Homo sapiens
tgatcgtaactgctgtctttgcaaatggagtgttttctagtgttttaacaataaacgtaatactgactctagctttgagataaattcttttaaaaatattmttcagggagaatatttgtttcctatcttcctgtgtatagtattgtaataaaatctctgttaaaaactatc

SEQ ID NO: 5586 - DNA, 201 bp, Homo sapiens
tagataaagtacataaaagaatatggaattttagtacctatattaagtgtttttaatttttgtataatatttagtacctgattagcgtgtatgcaaaaaastaatttgcttcgtttgttgaattagaagccagctgccttactaaactaccacatttgctttgctcattctcttggctttgcagatagaaaattatatcat

SEQ ID NO: 5587 - DNA, 109 bp, Homo sapiens
tgcattaaraagtcttcagcagtgatattagacattggggcatgctcttacaggcaatgggtggtgtcataaagagcatatttacattcgttttaattgtggaatttat

SEQ ID NO: 5588 - DNA, 201 bp, Homo sapiens
cacagttactaaaaataggcttcttaaacttacatctcaatctggtagataaagtacataaaagaatatggaattttagtacctatattaagtgtttttawtttttgtataatatttagtacctgattagcgtgtatgcaaaaaagtaatttgcttcgtttgttgaattagaagccagctgccttactaaactaccacatt

SEQ ID NO: 5589 - DNA, 201 bp, Homo sapiens
taaagagcatatttacattcgttttaattgtggaatttataattggaaatttaggaaatagtttcatagcactggtgaactgtattgactgggtcaagggwagaaagatctcttcggttgatcggatcctcactgctttggcaatctctcgaattagcctggtttggttaatattcggaagctggtgtgtgtctgtgtttt

SEQ ID NO: 5590 - DNA, 201 bp, Homo sapiens
tagaaaaaaaatagctcctaagaaattcttgtatgttatataaatttatacttccttaagattctttcattgtgtataactttgtgaattttacaaagatrtgcttggaatcaacaccatccaaacatatcacaaattaggatatatgaaagtatgtatattaccatacagagaagaatgcgaatactataaagagttctt

SEQ ID NO: 5591 - DNA, 201 bp, Homo sapiens
tcaatcattttagtgtctggttagctacaggcctcggtactttttattttctcaagatagccaatttttctaactctatttttctctacctaaagtggagrgttaaaaaggtggttttggtgctgcttcttgtgacttcggtcttcttgtttttaaatattgcactgataaacatccatataaatgccagtatcaatggat

SEQ ID NO: 5592 - DNA, 201 bp, Homo sapiens
cgctccctgccactcgcctcctctcactttcatctcttccctccacctcgcctgctcggcctgaaagccaccaggggctggcagcagtagcaggacagggmttcaggagttctgacgacacgactctcagatccacgcccccagcctaacagcaacaacaaagacagactttccgtagcagcttagattaacgttgatttc

SEQ ID NO: 5593 - DNA, 201 bp, Homo sapiens
agaaggaatacatgcaaatgaaataaaaaatcttaagaaagaactgcatgattcagaaggtcagcaacttgctctcaacaaagaaattatgattttaaaaracaaattggaaaaaaccagaagagaaagtcaaagtgaaagggaggaatttgaaagtgagttcaaacaacaatatgaacgagaaaaagtgttgttaactga

SEQ ID NO: 5594 - DNA, 201 bp, Homo sapiens
tcctggagatggaatacagatcctgaaagatctgcccatgaaccctcggcctcaggaaagtcggacagtattcagtggctcagtcagtattccatctatcrccaaatcccgccctgagccaggccgctccatgagtgctagcagtggcttgtcagcaaggtcatccgcacagaatggcagcgcattaaagagggaattctc

SEQ ID NO: 5595 - DNA, 201 bp, Homo sapiens
gtacacagagacattaaacctgacaatatactgatggatatgaatggacatattcggttagcagattttggttcttgtctgaagctgatggaagatggaayggttcagtcctcagtggctgtaggaactccagattatatctctcctgaaatccttcaagccatggaagatggaaaagggagatatggacctgaatgtgac

SEQ ID NO: 5596 - DNA, 201 bp, Homo sapiens
ctcaggacgaaatcgtcatgtacgactttttcctatgtcagcattggatgggcgagagaccgatttttacaagctgtcagaaactaaagggtgtcaaaccrtaacttctggaaaggtgcgccatggagctctcacatgcctgtgtgtggctatgaaaaggcaggtcctctgttatgaactatttcagagcaagacccgtca

SEQ ID NO: 5597 - DNA, 201 bp, Homo sapiens
agacagattttgctttcacagtagagtctcattatagtcctaaaatagctcatgggcttctccgcatccagaagggagaattggtccctggagtggctcamtaagctcttaatcagcaaacgcagtgagtatcaacctgattgttgccaggaaatccttatgaattaaaacaatgcatattttactacagtacagagttta

SEQ ID NO: 5598 - DNA, 201 bp, Homo sapiens
cccccaagcccagtttcaccccgaaaaaccaagagcctctccctggagagcactgaccgcgggagctgggacccgtgagctgcctcagcactgggacctcycgctctccgctccctgccactcgcctcctctcactttcatctcttccctccacctcgcctgctcggcctgaaagccaccaggggctggcagcagtagcag

SEQ ID NO: 5599 - DNA, 201 bp, Homo sapiens
aaaaaccaagagcctctccctggagagcactgaccgcgggagctgggacccgtgagctgcctcagcactgggacctctcgctctccgctccctgccactcrcctcctctcactttcatctcttccctccacctcgcctgctcggcctgaaagccaccaggggctggcagcagtagcaggacagggattcaggagttctgac

SEQ ID NO: 5600 - DNA, 201 bp, Homo sapiens
agtgatgccccagcgagggactttgacggagaggactctgactctccgaggcattccacagcttccaacagttccaacctaagcagccccccaagcccagyttcaccccgaaaaaccaagagcctctccctggagagcactgaccgcgggagctgggacccgtgagctgcctcagcactgggacctctcgctctccgctcc

SEQ ID NO: 5601 - DNA, 201 bp, Homo sapiens
tctccgcatccagaagggagaattggtccctggagtggctcactaagctcttaatcagcaaacgcagtgagtatcaacctgattgttgccaggaaatcctyatgaattaaaacaatgcatattttactacagtacagagtttaaatgaatacataaatgtagaagtactgaatgtatatatttaaaaggagcctcttgtat

SEQ ID NO: 5602 - DNA, 201 bp, Homo sapiens
aggtgcgccatggagctctcacatgcctgtgtgtggctatgaaaaggcaggtcctctgttatgaactatttcagagcaagacccgtcacagaaaatttaargaaattcaagtcccatataatgtccagtggatggcaatcttcagtgaacaactctgtgtgggattccagtcaggatttctaagataccccttgaatggag

SEQ ID NO: 5603 - DNA, 201 bp, Homo sapiens
catctgaaaggttacaaggagtgttgtagcttctgaaggtgcagaaaacaatttctaaaaatgcttttattcctgggctaatcctgtccctccctaagtcrcagcgaggtgtctgtcccagggctggagatgcttcccaaggaggagtctgttttgttgagagtgggcgtgggcttcttcacataagcctggggaaggaag

SEQ ID NO: 5604 - DNA, 201 bp, Homo sapiens
tcatctctacccaagatgtttcttttcctagtggtggaatttgaacacttctcactttttattgtattttatcttccgcagataaatgtagaaatacacgrttctgtcacctctgatcccttccatctgaaaggttacaaggagtgttgtagcttctgaaggtgcagaaaacaatttctaaaaatgcttttattcctgggc

SEQ ID NO: 5605 - DNA, 201 bp, Homo sapiens
gttgtacttttaattattattttatttaaatatacgacttaattgtattcttttaaaaatgcattaagtatatattttatggtaatttaccctcaaaatakatgtatatgggtgaaattgaagacgcttcagttaagtgaggttactggtgtgttggatgtttaattcagcaccagcattgcatgacagttgtttgaataa

SEQ ID NO: 5606 - DNA, 201 bp, Homo sapiens
agataatagtcggaaacaaatggttagaaacattaacaataagcggcgttattccttcagagtcccagaagaggaaaggatgcagcagaggagggaaatgytacgagatccagaaatgagaaataaattaatttctaatccaactaattttaatcacatagcacacatgggtcctggagatggaatacagatcctgaaaga

SEQ ID NO: 5607 - DNA, 201 bp, Homo sapiens
aagtgataagaataagattagacagattttgctttcacagtagagtctcattatagtcctaaaatagctcatgggcttctccgcatccagaagggagaatyggtccctggagtggctcactaagctcttaatcagcaaacgcagtgagtatcaacctgattgttgccaggaaatccttatgaattaaaacaatgcatattt

SEQ ID NO: 5608 - DNA, 201 bp, Homo sapiens
tcactaagctcttaatcagcaaacgcagtgagtatcaacctgattgttgccaggaaatccttatgaattaaaacaatgcatattttactacagtacagagwttaaatgaatacataaatgtagaagtactgaatgtatatatttaaaaggagcctcttgtattcaacaaaagatggatgcatatataagagagatgattta

SEQ ID NO: 5609 - DNA, 201 bp, Homo sapiens
agtgataagaataagattagacagattttgctttcacagtagagtctcattatagtcctaaaatagctcatgggcttctccgcatccagaagggagaattsgtccctggagtggctcactaagctcttaatcagcaaacgcagtgagtatcaacctgattgttgccaggaaatccttatgaattaaaacaatgcatatttt

SEQ ID NO: 5610 - DNA, 201 bp, Homo sapiens
ccgcacagaatggcagcgcattaaagagggaattctctggaggaagctacagtgccaagcggcagcccatgccctccccgtcagagggctctttgtcctcyggaggcatggaccaaggaagtgatgccccagcgagggactttgacggagaggactctgactctccgaggcattccacagcttccaacagttccaacctaa

SEQ ID NO: 5611 - DNA, 201 bp, Homo sapiens
cattaagaaattccagcttgggtacacgagcaacagatatgccctggaaaatgcgtcgttttgcgaaactggatatgtcagctagactggagttgcagtcrgctctggatgcagaaataagagccaaacaggccatccaagaagagttgaataaagttaaagcatctaatatcataacagaatgtaaactaaaagattcag

SEQ ID NO: 5612 - DNA, 201 bp, Homo sapiens
tcaatcctgatgctagcagacactgagaatgagaagaataagtgggtgggagtgctgagtgaattgcacaagattttgaagaaaaacaaattcagagaccrctcagtctatgttcccaaagaggcttatgacagcactctacccctcattaaaacaacccaggcagccgcaatcatagatcatgaaagaattgctttggga

SEQ ID NO: 5613 - DNA, 201 bp, Homo sapiens
tgtgtggattctcatgccatataacttgtgtaaacaaagctccaaccacttgtccagttcctcctgaacagacaaaaggtcccctgggtatagatcctcaraaaggaataggaacagcatatgaaggtcatgtcaggattcctaagccagctggagtgaagaaagggtggcagagagcactggctatagtgtgtgacttca

SEQ ID NO: 5614 - DNA, 201 bp, Homo sapiens
tcgaagcaaacatgtctggagaagtgcgtttgaggcagttggagcagtttattttggacgggcccgctcagaccaatgggcagtgcttcagtgtggagacrttactggatatactcatctgcctttatgatgaatgcaataattctccattgagaagagagaagaacattctcgaatacctagaatgggctaaaccattta

SEQ ID NO: 5615 - DNA, 201 bp, Homo sapiens
tggaatttgaacacttctcactttttattgtattttatcttccgcagataaatgtagaaatacacgattctgtcacctctgatcccttccatctgaaaggktacaaggagtgttgtagcttctgaaggtgcagaaaacaatttctaaaaatgcttttattcctgggctaatcctgtccctccctaagtcacagcgaggtgt

SEQ ID NO: 5616 - DNA, 201 bp, Homo sapiens
agcactgggacctctcgctctccgctccctgccactcgcctcctctcactttcatctcttccctccacctcgcctgctcggcctgaaagccaccaggggcyggcagcagtagcaggacagggattcaggagttctgacgacacgactctcagatccacgcccccagcctaacagcaacaacaaagacagactttccgtagc

SEQ ID NO: 5617 - DNA, 201 bp, Homo sapiens
aatcggactttattcattaatgatgcaaccggattcgtttcaggattacgttgcacgagttgaattttgaatgaaggagaagagtttttttttttttttttaaagaagtgttgactctctagttcgttgtacttttaattattattttatttaaatatacgacttaattgtattcttttaaaaatgcattaagtatatatt

SEQ ID NO: 5618 - DNA, 201 bp, Homo sapiens; identical to SEQ ID NO: 5592

SEQ ID NO: 5619 - DNA, 201 bp, Homo sapiens; identical to SEQ ID NO: 5593

SEQ ID NO: 5620 - DNA, 201 bp, Homo sapiens; identical to SEQ ID NO: 5594

SEQ ID NO: 5621 - DNA, 201 bp, Homo sapiens; identical to SEQ ID NO: 5595

SEQ ID NO: 5622 - DNA, 201 bp, Homo sapiens; identical to SEQ ID NO: 5596

SEQ ID NO: 5623 - DNA, 201 bp, Homo sapiens; identical to SEQ ID NO: 5597

SEQ ID NO: 5624 - DNA, 201 bp, Homo sapiens; identical to SEQ ID NO: 5598

SEQ ID NO: 5625 - DNA, 201 bp, Homo sapiens; identical to SEQ ID NO: 5599

SEQ ID NO: 5626 - DNA, 201 bp, Homo sapiens; identical to SEQ ID NO: 5600

SEQ ID NO: 5627 - DNA, 201 bp, Homo sapiens; identical to SEQ ID NO: 5601

SEQ ID NO: 5628 - DNA, 201 bp, Homo sapiens; identical to SEQ ID NO: 5602

SEQ ID NO: 5629 - DNA, 201 bp, Homo sapiens; identical to SEQ ID NO: 5603

SEQ ID NO: 5630 - DNA, 201 bp, Homo sapiens; identical to SEQ ID NO: 5604

SEQ ID NO: 5631 - DNA, 201 bp, Homo sapiens; identical to SEQ ID NO: 5605

SEQ ID NO: 5632 - DNA, 201 bp, Homo sapiens; identical to SEQ ID NO: 5606

SEQ ID NO: 5633 - DNA, 201 bp, Homo sapiens; identical to SEQ ID NO: 5607

SEQ ID NO: 5634 - DNA, 201 bp, Homo sapiens; identical to SEQ ID NO: 5608

SEQ ID NO: 5635 - DNA, 201 bp, Homo sapiens; identical to SEQ ID NO: 5609

SEQ ID NO: 5636 - DNA, 201 bp, Homo sapiens; identical to SEQ ID NO: 5610

SEQ ID NO: 5637 - DNA, 201 bp, Homo sapiens; identical to SEQ ID NO: 5611

SEQ ID NO: 5638 - DNA, 201 bp, Homo sapiens; identical to SEQ ID NO: 5612

SEQ ID NO: 5639 - DNA, 201 bp, Homo sapiens; identical to SEQ ID NO: 5613

SEQ ID NO: 5640 - DNA, 201 bp, Homo sapiens; identical to SEQ ID NO: 5614

SEQ ID NO: 5641 - DNA, 201 bp, Homo sapiens; identical to SEQ ID NO: 5615

SEQ ID NO: 5642 - DNA, 201 bp, Homo sapiens; identical to SEQ ID NO: 5616

SEQ ID NO: 5643 - DNA, 201 bp, Homo sapiens; identical to SEQ ID NO: 5617

SEQ ID NO: 5644 - DNA, 201 bp, Homo sapiens
gctgcagttctaggtgagagcgcgcgacgcgggcatgccgcctctgagcagcaatgtgacgctgccaggtattagtgctggaacgacaactttgtctgcgytgctggcgccttgggtgggctggcggcgctgtgagtgagctggtgcggtattcagtggatgcaggccacttggtggcgaaggtgcgcacggtggactcca

SEQ ID NO: 5645 - DNA, 201 bp, Homo sapiens
aggacggcacatagcgtcttcgcggtccctattgcgcaggacctgggtctggagcttgtggagctgataccgcgcctgtttcagttggattccaaaagcckcagaaaccttctggaggtaaatctgcagaatggcatttttgtgagttctctgatagacctcgaggagctgtgtgggaggatctcggagtgcagcatccac

SEQ ID NO: 5646 - DNA, 201 bp, Homo sapiens
tggccgaacagtgaaccacaatgccctggcgttccagcagcccgagtacatggtgttcgtgaaaggtaacaacccgcggggctgccacgacttcacagtgyccgcgcgggaccgggacgcgcaggagaacgtgctggtgtcctactcgttgatggaacagcgggtgggcgagtgcgcgctgtctagctatgtgtgggtgca

SEQ ID NO: 5647 - DNA, 201 bp, Homo sapiens
cacgccaggctaattttttgtatttttagtagagacgaggtttcaccgtgttagccaggatggtctagatctcctgacctcgtgatccaccggcctcggcytcccaaagtgctggccgagtgccaccgcacccggccgaaaggtattttttttaacagaagaaaatcagattattcctagatcagaaagaagctccattgt

SEQ ID NO: 5648 - DNA, 186 bp, Homo sapiens
gagacggagtctcgctctgttgcccaggctggagtgcagtggcacgatctcggctcactgcaagctccgcctcccaggttcacgcyattctcctgcctcagcctccggagtagctgggactacaggtgcccgccaacacgccaggctaattttttgtatttttagtagagacgaggtttcaccgtg

SEQ ID NO: 5649 - DNA, 201 bp, Homo sapiens
gctggagctgctgcagttctaggtgagagcgcgcgacgcgggcatgccgcctctgagcagcaatgtgacgctgccaggtattagtgctggaacgacaactwtgtctgcgctgctggcgccttgggtgggctggcggcgctgtgagtgagctggtgcggtattcagtggatgcaggccacttggtggcgaaggtgcgcacgg

SEQ ID NO: 5650 - DNA, 201 bp, Homo sapiens
tttgctcaagattgccaatttctccaaccttatttctctccacctaaagaagagaattaagagtgttgttctggtgatactgttggggcccttggtatttytgatttgtaatcttgctgtgataaccatggatgagagagtgtggacaaaagaatatgaaggaaatgtgacttggaagatcaaattgaggaatgcaataca

SEQ ID NO: 5651 - DNA, 184 bp, Homo sapiens
atgatgtgttttctgctcatcatttcatcaattctggtagtgtttgcatttgttcttggaaatgttgccaatggcttcatagcyctagtaaatgtcattgactgggttaacacacgaaagatctcctcagctgagcaaattctcactgctctggtggtctccagaattggtttactctgggtca

SEQ ID NO: 5652 - DNA, 201 bp, Homo sapiens
tctgctttatatggtttagaagtaagaattgttgcttctaatgcctgggctgtaacgaaccatttcagcatgtggcttgctgctagcctcagcatattttrtttgctcaagattgccaatttctccaaccttatttctctccacctaaagaagagaattaagagtgttgttctggtgatactgttggggcccttggtattt

SEQ ID NO: 5653 - DNA, 201 bp, Homo sapiens
ccatttcagcatgtggcttgctgctagcctcagcatattttgtttgctcaagattgccaatttctccaaccttatttctctccacctaaagaagagaattmagagtgttgttctggtgatactgttggggcccttggtatttttgatttgtaatcttgctgtgataaccatggatgagagagtgtggacaaaagaatatga

SEQ ID NO: 5654 - DNA, 106 bp, Homo sapiens
aactgttgcaatcatgtatccttcattccactcattcatcctgattatgggaagtaggaagctaaaacagacctttctttcagttttgtggcagatgacaygctga

SEQ ID NO: 5655 - DNA, 201 bp, Homo sapiens
aagatccacataaaagctctgcaaactgtgacctccttcctcatattacttgccatttactttctgtgtctaatcatatcgttttggaattttaagatgckaccaaaagaaattgtcttaatgctttgccaagcttttggaatcatatatccatcattccactcattcattctgatttgggggaacaagacgctaaagcag

SEQ ID NO: 5656 - DNA, 201 bp, Homo sapiens
cccagcaccaagatccacataaaagctctgcaaactgtgacctccttcctcatattacttgccatttactttctgtgtctaatcatatcgttttggaattytaagatgctaccaaaagaaattgtcttaatgctttgccaagcttttggaatcatatatccatcattccactcattcattctgatttgggggaacaagacg

SEQ ID NO: 5657 - DNA, 201 bp, Homo sapiens
tcaaattattgctgctctggcagtctccagagttggtttgctctgggtaatattattacattggtattcaactgtgttgaatccaacttcatctaatttaraagtaataatttttatttctaatgcctgggcagtaaccaatcatttcagcatctggcttgctactagcctcagcatattttatttgctcaagatcgtcaa

SEQ ID NO: 5658 - DNA, 201 bp, Homo sapiens
ttggaaattttgccaatggctttatagcactgataaatttcattgcctgggtcaagagacaaaagatctcctcagctgatcaaattattgctgctctggcrgtctccagagttggtttgctctgggtaatattattacattggtattcaactgtgttgaatccaacttcatctaatttaaaagtaataatttttatttcta

SEQ ID NO: 5659 - DNA, 201 bp, Homo sapiens
cagacttatttttcatcacttaaaaaggaaggctaagagtgtagttctggtgatagtgttggggtctttgttctttttggtttgtcaccttgtgatgaaamacacgtatataaatgtgtggacagaagaatgtgaaggaaacgtaacttggaagatcaaactgaggaatgcaatgcacctttccaacttgactgtagccat

SEQ ID NO: 5660 - DNA, 201 bp, Homo sapiens
gtgtaaacatctgaagaagatgcagctccatggcaaaggatctcaagatcccagcaccaagatccacataaaagctctgcaaactgtgacctccttcctcrtattacttgccatttactttctgtgtctaatcatatcgttttggaattttaagatgctaccaaaagaaattgtcttaatgctttgccaagcttttggaat

SEQ ID NO: 5661 - DNA, 201 bp, Homo sapiens
ggggaacaagacgctaaagcagacctttctttcagttttgtggcaggtgacttgctgggcaaaaggacagaaccagtcaactccatagattcacaagaggygcattgtgtgttttctagcagaaaacaaattgatggtgtctggaacattttatatttcccacaagtttttccgtagtctatgtatttgagtaatttccaa

SEQ ID NO: 5662 - DNA, 201 bp, Homo sapiens
tcgtcaatttctccagacttatttttcatcacttaaaaaggaaggctaagagtgtagttctggtgatagtgttggggtctttgttctttttggtttgtcamcttgtgatgaaacacacgtatataaatgtgtggacagaagaatgtgaaggaaacgtaacttggaagatcaaactgaggaatgcaatgcacctttccaact

SEQ ID NO: 5663 - DNA, 201 bp, Homo sapiens
ccagagttggtttgctctgggtaatattattacattggtattcaactgtgttgaatccaacttcatctaatttaaaagtaataatttttatttctaatgcytgggcagtaaccaatcatttcagcatctggcttgctactagcctcagcatattttatttgctcaagatcgtcaatttctccagacttatttttcatcact

SEQ ID NO: 5664 - DNA, 201 bp, Homo sapiens
cctttactctgtccctgttatcttttctgctcttaatctgttctttgtgtaaacatctcaagaagatgcagttccatggcaaaggatctccagattccaayaccaaggtccacataaaagctttgcaaacggtgacctccttcctcttgttatttgctgtttactttctgtccctaatcacatcgatttggaattttagga

SEQ ID NO: 5665 - DNA, 201 bp, Homo sapiens
gttcatatagtttaggagtaagaattactactattaatgcctgggctgtaaccaaccatttcagcatctgggttgctactagcctcagcatattttatttsctcaagattgccaatttctccaactttatttttcttcacttaaaaaggagaattaagagtgtcattccagtgatactattggggtctttgttatttttgg

SEQ ID NO: 5666 - DNA, 201 bp, Homo sapiens
ttgggaattttgctaatggcttcatagtgttggtaaattccattgagtgggtcaagagacaaaagatctcctttgctgaccaaattctcactgctctggcrgtctccagagttggtttgctctgggtaatattattacattggtatgcaactgttttgaatccaggttcatatagtttaggagtaagaattactactatta

SEQ ID NO: 5667 - DNA, 195 bp, Homo sapiens
atgataacttttctacccatcattttttccattctagtagtggttacatttgttcttgggaattttgctaatggcttcatagtgttggtaaattscattgagtgggtcaagagacaaaagatctcctttgctgaccaaattctcactgctctggcagtctccagagttggtttgctctgggtaatattattacat

SEQ ID NO: 5668 - DNA, 201 bp, Homo sapiens
gactgtaaccacgcttgcaaacttaataccctttactctgtccctgttatcttttctgctcttaatctgttctttgtgtaaacatctcaagaagatgcagytccatggcaaaggatctccagattccaacaccaaggtccacataaaagctttgcaaacggtgacctccttcctcttgttatttgctgtttactttctgtc

SEQ ID NO: 5669 - DNA, 201 bp, Homo sapiens
gacctccttcctcttgttatttgctgtttactttctgtccctaatcacatcgatttggaattttaggaggaggctgtagaacgaacctgtcctcatgctcrgccaaactactgcaattatatacccttcatttcattcattcatcctaatttggggaagcaagaagctgaaacagacctttcttttgattttgtgtcagat

SEQ ID NO: 5670 - DNA, 201 bp, Homo sapiens
gcaaaggatctccagattccaacaccaaggtccacataaaagctttgcaaacggtgacctccttcctcttgttatttgctgtttactttctgtccctaatsacatcgatttggaattttaggaggaggctgtagaacgaacctgtcctcatgctcagccaaactactgcaattatatacccttcatttcattcattcatcc

SEQ ID NO: 5671 - DNA, 190 bp, Homo sapiens
ggcctgtcctcttctagacttcgttgcggcaaggacttttagtagtgtgctggtatttttccatccatctggccattcatttcttctaattttacgggacwgcaaactgaagcaagcttctctctgtgtcctgaagaagatgaagtatgccaaaaaggacataatctctcatttttataaacatgcctga

SEQ ID NO: 5672 - DNA, 201 bp, Homo sapiens
gtgatactgttggggtccttggtatttttgatttgtaatcttgctgtggtaaccatggatgacagtgtgtggacaaaagaatttgaaggaaatgtgacttkgaagatcgaattgaggaatgcaatacacctttcaaacatgactataaccaaccatgctagcaaacttcacactgttcattctgactctaatatcttttct

SEQ ID NO: 5673 - DNA, 201 bp, Homo sapiens
ccgtgtaaacatctcaagatgatgcagctccatggcaaaggatctcaagatctcagcaccaaggtccatataaaacctttgcaaactgttatctccttccktatgttatttgccatttactttctgtgtataatcacatcaacttggaatcctaggacacagcagagcaatcttgtattcctgctttaccaaactcttgca

SEQ ID NO: 5674 - DNA, 201 bp, Homo sapiens
aatacagtacatctttcatatttgactgtaactaccctatggagcttcataccctttactctgtccctgatatcttttctgatgctaatctgttctctgtrtaaacatctcaagaagatgcagctccatggagaaggatcgcaagatctcagcaccaaggtccacataaaagctttgcaaactctgatctccttcctcttg

SEQ ID NO: 5675 - DNA, 201 bp, Homo sapiens
ttcagcatgtggcttgctgctaacctcagcatattttatttgctcaagattgccaatttctccaaccttctttttcttcatttaaagaggagagttaggartgtcattctggtgatactgttggggactttgatatttttggtttgtcatcttcttgtggcaaacatggatgagagtatgtgggcagaagaatatgaagga

SEQ ID NO: 5676 - DNA, 201 bp, Homo sapiens
aagctttgcaaactctgatctccttcctcttgttatgtgccattttctttctattcctaatcgtttcggtttggagtcctaggaggctgcggaatgacccrgttgtcatggttagcaaggctgttggaaacatatatcttgcattcgactcattcatcctaatttggagaaccaagaagctaaaacacacctttcttttga

SEQ ID NO: 5677 - DNA, 106 bp, Homo sapiens
cccattcatcctgatttggggaaacaagaagctaaagcagacttttctttcagttttgtggcatgtgaggtactgggtgaaaggagagaagccttcatctycatag

SEQ ID NO: 5678 - DNA, 201 bp, Homo sapiens
ttttctgctgttaatctgttctctgtgtaaacatctcaaaaagatgcagctccatggcaaaggatctcaagatcccagcatgaaggtccacataaaagctwtgcaaactgtgacctccttcctcttgttatgtgccatttactttctgtccataatcatgtcagtttggagttttgagagtctggaaaacaaacctgtctt

SEQ ID NO: 5679 - DNA, 201 bp, Homo sapiens
aacttttctgcccatcattttttccattctaatagtggttacatttgtgattggaaattttgctaatggcttcatagcattggtaaattccattgagtggktcaagagacaaaagatctcttttgctgaccaaattctcactgctctggcagtctccagagttggtttactctgggtattagtattaaattggtatgcaac

SEQ ID NO: 5680 - DNA, 201 bp, Homo sapiens
ttgtgataaacatgaatcagattatatggacaaaagaatatgaaggaaacatgacttggaagatcaaactgaggagtgcaatgtacctttcaaatacaacrgtaaccatcctagcaaacttagttcccttcactctgaccctgatatcttttctgctgttaatctgttctctgtgtaaacatctcaaaaagatgcagctcc

SEQ ID NO: 5681 - DNA, 171 bp, Homo sapiens
gccatttactttctgtgtctaatcacatcaacttggaatcctaggactcagcagagcaaacttgtattcctgctttaccaaactcttggattcatgtatcytttgttccactcattcatcctgactatgggaagtaggaagccaaaacagacctttctttcagctttgtga

SEQ ID NO: 5682 - DNA, 201 bp, Homo sapiens
tattacattggtatgcaactgtgtttaatttggcttcatatagattagaagtaagaatttttggttctaatgtctcagcaataaccaagcatttcagcatstgggtgttactagcctcagcatatttcatttgctcaagactgccaatttctccaaccttatttttctccacctaaagaagaggattaagaatgttggttt

SEQ ID NO: 5683 - DNA, 201 bp, Homo sapiens
tcagctgaccaaatttctcactgctctggtggtgtccagaattggtttactctgggtcatattattacattggtatgcaactgtgtttaatttggcttcayatagattagaagtaagaatttttggttctaatgtctcagcaataaccaagcatttcagcatctgggtgttactagcctcagcatatttcatttgctcaag

SEQ ID NO: 5684 - DNA, 201 bp, Homo sapiens
gccaatggcttcatagctctagtaggtgtccttgagtgggttaagacacaaaagatctcatcagctgaccaaatttctcactgctctggtggtgtccagarttggtttactctgggtcatattattacattggtatgcaactgtgtttaatttggcttcatatagattagaagtaagaatttttggttctaatgtctcagc

SEQ ID NO: 5685 - DNA, 201 bp, Homo sapiens
aattctggtagtgtttgcatttgttcttggaaatgttgccaatggcttcatagctctagtaggtgtccttgagtgggttaagacacaaaagatctcatcarctgaccaaatttctcactgctctggtggtgtccagaattggtttactctgggtcatattattacattggtatgcaactgtgtttaatttggcttcatata

SEQ ID NO: 5686 - DNA, 201 bp, Homo sapiens
cttatttttctccacctaaagaagaggattaagaatgttggtttggtgatgctgttggggcccttggtatttttcatttgtaatcttgctctgataaccaygggtgagagtgtgtggacaaaagaatatgaaggaaatttgtcttggatgatcaaattgaggaatgcaatacagctttcaaacttgactgtaaccatgcca

SEQ ID NO: 5687 - DNA, 201 bp, Homo sapiens
ataaccaagcatttcagcatctgggtgttactagcctcagcatatttcatttgctcaagactgccaatttctccaaccttatttttctccacctaaagaaraggattaagaatgttggtttggtgatgctgttggggcccttggtatttttcatttgtaatcttgctctgataaccacgggtgagagtgtgtggacaaaag

SEQ ID NO: 5688 - DNA, 110 bp, Homo sapiens
tccacccattcatcctgatttggggaaacaagaagctaaagcagacttttctttcagttttgcggcaagtgaggtactgggtgaaaggagagaagccttcrtctccatag

SEQ ID NO: 5689 - DNA, 201 bp, Homo sapiens
tgttttttgctgttaatctgttctctgtgtaaacatctcaagaagatgcagctccatggtaaaggatctcaagatcccagcaccaaggtccacataaaagytttgcaaactgtgatctttttcctcttgttatgtgccgtttactttctgtccataatgatatcagtttggagttttgggagtctggaaaacaaacctgtc

SEQ ID NO: 5690 - DNA, 201 bp, Homo sapiens
caagaagatgcagctccatggtaaaggatctcaagatcccagcaccaaggtccacataaaagctttgcaaactgtgatctttttcctcttgttatgtgccrtttactttctgtccataatgatatcagtttggagttttgggagtctggaaaacaaacctgtcttcatgttctgcaaagctattagattcagctatccttc

SEQ ID NO: 5691 - DNA, 201 bp, Homo sapiens
aaacttagtgcccttcactctgaccctgctatgttttttgctgttaatctgttctctgtgtaaacatctcaagaagatgcagctccatggtaaaggatctsaagatcccagcaccaaggtccacataaaagctttgcaaactgtgatctttttcctcttgttatgtgccgtttactttctgtccataatgatatcagtttg

SEQ ID NO: 5692 - DNA, 201 bp, Homo sapiens
gacaacttttatacccatcattttttccagtgtggtagtggttctatttgttattggaaattttgctaatggcttcatagcattggtaaattccattgagygggtcaagagacaaaagatctcttttgctgaccagattctcactgctctggcggtctccagagttggtttgctctgggtattattattaaattggtattc

SEQ ID NO: 5693 - DNA, 201 bp, Homo sapiens
cattctggtgatgctgttggggcctttactatttttggcttgtcaactttttgtgataaacatgaaagagattgtacggacaaaagaatatgaaggaaacwtgacttggaagatcaaattgaggagtgcagtgtacctttcagatgcgactgtaaccacgctaggaaacttagtgcccttcactctgaccctgctatgttt

SEQ ID NO: 5694 - DNA, 201 bp, Homo sapiens
tcaagattgccaatttctccaaccttatttttcttcacttaaagaggagagttaagagtgtcattctggtgatgctgttggggcctttactatttttggcytgtcaactttttgtgataaacatgaaagagattgtacggacaaaagaatatgaaggaaacatgacttggaagatcaaattgaggagtgcagtgtaccttt

SEQ ID NO: 5695 - DNA, 201 bp, Homo sapiens
ctgtccataatgatatcagtttggagttttgggagtctggaaaacaaacctgtcttcatgttctgcaaagctattagattcagctatccttcaatccaccsattcatcctgatttggggaaacaagaagctaaagcagacttttctttcagttttgcggcaagtgaggtactgggtgaaaggagagaagccttcatctcca

SEQ ID NO: 5696 - DNA, 158 bp, Homo sapiens
ggagacagctaaggaaagaagctggggcgcatgtttctgcccaaagccgggttttggmcgaggtgactacacaccccctttcctggctcccataggctaagtgcctggcttcttgagaagcctgcttcttgagaacaaaaaagtgatttaaagcctca

SEQ ID NO: 5697 - DNA, 201 bp, Homo sapiens
ccaagtttcctctggcagacatgctgcacgtctgtacccttctcagatcaactccctggtgatgtttcttccacatacatctgtgaaatgaacaaggaagkgaggcttcccaagaatttagcttgctgtgcagtggctgcaggcgcagaacagagcgttacttgataacagcgttccatctttgtgttgtagcagatgaaa

SEQ ID NO: 5698 - DNA, 201 bp, Homo sapiens
gcgcagaacagagcgttacttgataacagcgttccatctttgtgttgtagcagatgaaatggacagtaatgtgagttcagactttgggcatcttgctcttrgctggaactggataataaaaatcagactgaaagccaggacatctgagtacctatctcacacactggaccaccagtcacaaagtctggaaaagtttacatt

SEQ ID NO: 5699 - DNA, 201 bp, Homo sapiens
ctgtgagcagctgccaggctccggccaggatcccttccttctcctcattggctgatggatcccaaggggctcctctccttgaccttcgtgctgtttctctycctggcttttggggcaagctacggaacaggtgggcgcatgatgaactgcccaaagattctccggcagttgggaagcaaagtgctgctgcccctgacatat

SEQ ID NO: 5700 - DNA, 201 bp, Homo sapiens
gttcaggaacctgctggttcctgatacataaatcagacagcctctgctgcatgacacgaagcttgcttctgcctggcatctgtgagcagctgccaggctcyggccaggatcccttccttctcctcattggctgatggatcccaaggggctcctctccttgaccttcgtgctgtttctctccctggcttttggggcaagcta

SEQ ID NO: 5701 - DNA, 201 bp, Homo sapiens
tgaactgcccaaagattctccggcagttgggaagcaaagtgctgctgcccctgacatatgaaaggataaataagagcatgaacaaaagcatccacattgtygtcacaatggcaaaatcactggagaacagtgtcgagaacaaaatagtgtctcttgatccatccgaagcaggccctccacgttatctaggagatcgctaca

SEQ ID NO: 5702 - DNA, 201 bp, Homo sapiens
ggctcctctccttgaccttcgtgctgtttctctccctggcttttggggcaagctacggaacaggtgggcgcatgatgaactgcccaaagattctccggcakttgggaagcaaagtgctgctgcccctgacatatgaaaggataaataagagcatgaacaaaagcatccacattgtcgtcacaatggcaaaatcactggaga

SEQ ID NO: 5703 - DNA, 201 bp, Homo sapiens
ctttctgaaggaaaatggaaaaaccaaaatgaacactgaacttggccacaggccccaagtttcctctggcagacatgctgcacgtctgtacccttctcagwtcaactccctggtgatgtttcttccacatacatctgtgaaatgaacaaggaagtgaggcttcccaagaatttagcttgctgtgcagtggctgcaggcgca

SEQ ID NO: 5704 - DNA, 201 bp, Homo sapiens
gtgaaaaggcgggcacccacccactgaacccagccaacagctcccacctcctgtccctcaccctcggcccccagcatgctgacaatatctacatctgcacygtgagcaaccctatcagcaacaattcccagaccttcagcccgtggcccggatgcaggacagacccctcagaaacaaaaccatgggcagtgtatgctgggc

SEQ ID NO: 5705 - DNA, 201 bp, Homo sapiens
ctcacacactggaccaccagtcacaaagtctggaaaagtttacattttggctatctttactttgttctgggagctgatcatgataacctgcagacctgatsaagcctctgtgcctcagtttctctctcaggataaagagtgaatagaggctgaagggtgaatttcttattatacataaaacactctgatattattgtataa

SEQ ID NO: 5706 - DNA, 201 bp, Homo sapiens
cataaatcagacagcctctgctgcatgacacgaagcttgcttctgcctggcatctgtgagcagctgccaggctccggccaggatcccttccttctcctcaktggctgatggatcccaaggggctcctctccttgaccttcgtgctgtttctctccctggcttttggggcaagctacggaacaggtgggcgcatgatgaact

SEQ ID NO: 5707 - DNA, 201 bp, Homo sapiens
ctatctttactttgttctgggagctgatcatgataacctgcagacctgatcaagcctctgtgcctcagtttctctctcaggataaagagtgaatagaggcygaagggtgaatttcttattatacataaaacactctgatattattgtataaaggaagctaagaatattattttatttgcaaaacccagaagctaaaaagtc

SEQ ID NO: 5708 - DNA, 201 bp, Homo sapiens
aagcgggttcaggaacctgctggttcctgatacataaatcagacagcctctgctgcatgacacgaagcttgcttctgcctggcatctgtgagcagctgccmggctccggccaggatcccttccttctcctcattggctgatggatcccaaggggctcctctccttgaccttcgtgctgtttctctccctggcttttggggc

SEQ ID NO: 5709 - DNA, 201 bp, Homo sapiens
tccatctttgtgttgtagcagatgaaatggacagtaatgtgagttcagactttgggcatcttgctcttggctggaactggataataaaaatcagactgaawgccaggacatctgagtacctatctcacacactggaccaccagtcacaaagtctggaaaagtttacattttggctatctttactttgttctgggagctgat

SEQ ID NO: 5710 - DNA, 201 bp, Homo sapiens
acagctaaggaaagaagctggggcgcatgtttctgcccaaagccgggttttggccgaggtgactacacaccccctttcctggctcccataggctaagtgcytggcttcttgagaagcctgcttcttgagaacaaaaaagtgatttaaagcctcatgggagatgagcaatcctcaagacacaagcagaaaaagtcccagtga

SEQ ID NO: 5711 - DNA, 129 bp, Homo sapiens
ggagacagctaaggaaagaagctggggcrcatgtttctgcccaaagccgggttttggccgaggtgactacacaccccctttcctggctcccataggctaagtgcctggcttcttgagaagcctgcttct

SEQ ID NO: 5712 - DNA, 201 bp, Homo sapiens
cttctgcctggcatctgtgagcagctgccaggctccggccaggatcccttccttctcctcattggctgatggatcccaaggggctcctctccttgaccttmgtgctgtttctctccctggcttttggggcaagctacggaacaggtgggcgcatgatgaactgcccaaagattctccggcagttgggaagcaaagtgctgc

SEQ ID NO: 5713 - DNA, 201 bp, Homo sapiens
tcaggacccttgcaccaccatatatgttgctgccacagagcctgtcccagagtctgtccaggaaacaaattccatcacagtctatgctagtgtgacacttmcagagagctgacaccagagaccaacaaagggactttctgaaggaaaatggaaaaaccaaaatgaacactgaacttggccacaggccccaagtttcctctg

SEQ ID NO: 5714 - DNA, 201 bp, Homo sapiens
tgcccaagtccagaaaccaggtcctcttcagaagaaacttgactccttcccagctcaggacccttgcaccaccatatatgttgctgccacagagcctgtcycagagtctgtccaggaaacaaattccatcacagtctatgctagtgtgacacttccagagagctgacaccagagaccaacaaagggactttctgaaggaaa

SEQ ID NO: 5715 - DNA, 201 bp, Homo sapiens
aagaagaatggaatgaacataatgccaaaataattaaatatataagaactaagacaaagccccatttgttttatattcctggaagaatgtgtccagctacycaaaaactaatagaagagtcacagagaaaaatgaacgctttatttgaaggtagacgcatcgaatttgcagaacaaataaataaaatggaggctaggccta

SEQ ID NO: 5716 - DNA, 115 bp, Homo sapiens
gtcagtcctttcgcrcctcggcggcgcggcatagcccggctcggcctgtaaagcagtctcaagcctgccgcagggagaagatggcggtcgccgtgagaactttgcaggaacagct

SEQ ID NO: 5717 - DNA, 201 bp, Homo sapiens
gcagtggaagtagttccagcagtggaagtagtagcagtcgcagtagttccagtagcagctccagtacaagtggcagcagcagcagagatagtagcagtagyactagtagtagtagtgagagtagaagtcggagtaggggccggggacataatagagatagaaagcacagaaggagcgtggatcggaagagaagggatactt

SEQ ID NO: 5718 - DNA, 201 bp, Homo sapiens
acctcagcctcagtctcagccccagcttcagcttcaatcccagtcccaaccagtactccagtcccagcctccctctcagcctgaggatttgtcattagctsttttacagccaacaccccaagttactcaggagcaagggcatttactacctgagaggaaggattttcctgtagagtctgtaaaactcactgaggtaccagt

SEQ ID NO: 5719 - DNA, 201 bp, Homo sapiens
aacttgaagttcaggcagaagaagagagaaagcaggttgaaaatgaaaggagagaactgtttgaagagaggcgtgctaaacagacagaactgcggcttttrgaacagaaagttgagcttgcgcagctgcaagaagaatggaatgaacataatgccaaaataattaaatatataagaactaagacaaagccccatttgtttt

SEQ ID NO: 5720 - DNA, 201 bp, Homo sapiens
ttggcttgttgatgggtacccttcaaaaatttaaacaagaatccactgttgctactgaaaggcaaaagcggcgccaggaaattgaacaaaaacttgaagtkcaggcagaagaagagagaaagcaggttgaaaatgaaaggagagaactgtttgaagagaggcgtgctaaacagacagaactgcggcttttggaacagaaag

SEQ ID NO: 5721 - DNA, 201 bp, Homo sapiens
aagagcgcacacgtagagaccttatccaggatcaaaatatggatgaaaagggaaagcaaaggaaccggcgaatatttggcttgttgatgggtacccttcaraaatttaaacaagaatccactgttgctactgaaaggcaaaagcggcgccaggaaattgaacaaaaacttgaagttcaggcagaagaagagagaaagcagg

SEQ ID NO: 5722 - DNA, 201 bp, Homo sapiens
ctacctccaaagagcgcacacgtagagaccttatccaggatcaaaatatggatgaaaagggaaagcaaaggaaccggcgaatatttggcttgttgatgggyacccttcaaaaatttaaacaagaatccactgttgctactgaaaggcaaaagcggcgccaggaaattgaacaaaaacttgaagttcaggcagaagaagaga

SEQ ID NO: 5723 - DNA, 201 bp, Homo sapiens
gacgcatcgaatttgcagaacaaataaataaaatggaggctaggcctagaagacaatcaatgaaggaaaaagagcatcaggtggtgcgtaatgaagaacasaaggcggaacaagaagagggtaaggtggctcagcgagaggaagagttggaggagacaggtaatcagcacaatgatgtagaaatagaggaagcaggagagg

SEQ ID NO: 5724 - DNA, 201 bp, Homo sapiens
agacaatcaatgaaggaaaaagagcatcaggtggtgcgtaatgaagaacagaaggcggaacaagaagagggtaaggtggctcagcgagaggaagagttggwggagacaggtaatcagcacaatgatgtagaaatagaggaagcaggagaggaagaggaaaaggaaatagcgattgttcatagtgatgcagagaaagaacag

SEQ ID NO: 5725 - DNA, 201 bp, Homo sapiens
aggaaaaagagcatcaggtggtgcgtaatgaagaacagaaggcggaacaagaagagggtaaggtggctcagcgagaggaagagttggaggagacaggtaaycagcacaatgatgtagaaatagaggaagcaggagaggaagaggaaaaggaaatagcgattgttcatagtgatgcagagaaagaacaggaggaggaagaac

SEQ ID NO: 5726 - DNA, 201 bp, Homo sapiens
aggtggtgcgtaatgaagaacagaaggcggaacaagaagagggtaaggtggctcagcgagaggaagagttggaggagacaggtaatcagcacaatgatgtwgaaatagaggaagcaggagaggaagaggaaaaggaaatagcgattgttcatagtgatgcagagaaagaacaggaggaggaagaacaaaaacaggaaatgg

SEQ ID NO: 5727 - DNA, 201 bp, Homo sapiens
tggaggagacaggtaatcagcacaatgatgtagaaatagaggaagcaggagaggaagaggaaaaggaaatagcgattgttcatagtgatgcagagaaagarcaggaggaggaagaacaaaaacaggaaatggaggttaagatggaggaggaaactgaggtaagggaaagtgagaagcagcaggatagtcagcctgaagaag

SEQ ID NO: 5728 - DNA, 201 bp, Homo sapiens
gtaatcagcacaatgatgtagaaatagaggaagcaggagaggaagaggaaaaggaaatagcgattgttcatagtgatgcagagaaagaacaggaggaggargaacaaaaacaggaaatggaggttaagatggaggaggaaactgaggtaagggaaagtgagaagcagcaggatagtcagcctgaagaagttatggatgtgc

SEQ ID NO: 5729 - DNA, 201 bp, Homo sapiens
aactgaggtaagggaaagtgagaagcagcaggatagtcagcctgaagaagttatggatgtgctagagatggttgagaatgtcaaacatgtaattgctgacsaggaggtaatggaaactaatcgagttgaaagtgtagaaccttcagaaaatgaagctagcaaagaattggaaccagaaatggaatttgaaattgagccaga

SEQ ID NO: 5730 - DNA, 201 bp, Homo sapiens
aaccagaaatggaatttgaaattgagccagataaagaatgtaaatccctttctcctgggaaagagaatgtcagtgctttagacatggaaaaggagtctgasgaaaaagaagaaaaagaatctgagccccaacctgagcctgtggctcaacctcagcctcagtctcagccccagcttcagcttcaatcccagtcccaaccag

SEQ ID NO: 5731 - DNA, 201 bp, Homo sapiens
agtagaagtcggagtaggggccggggacataatagagatagaaagcacagaaggagcgtggatcggaagagaagggatacttcaggactagaaagaagtcmcaaatcttcaaaaggtggtagtagtagagatacaaaaggatcaaaggataagaattcccggtccgacagaaagaggtctatatcagagagtagtcgatca

SEQ ID NO: 5732 - DNA, 201 bp, Homo sapiens
gagtctgaggaaaaagaagaaaaagaatctgagccccaacctgagcctgtggctcaacctcagcctcagtctcagccccagcttcagcttcaatcccagtsccaaccagtactccagtcccagcctccctctcagcctgaggatttgtcattagctgttttacagccaacaccccaagttactcaggagcaagggcattta

SEQ ID NO: 5733 - DNA, 201 bp, Homo sapiens
ctgaggaaaaagaagaaaaagaatctgagccccaacctgagcctgtggctcaacctcagcctcagtctcagccccagcttcagcttcaatcccagtcccawccagtactccagtcccagcctccctctcagcctgaggatttgtcattagctgttttacagccaacaccccaagttactcaggagcaagggcatttactac

SEQ ID NO: 5734 - DNA, 195 bp, Homo sapiens
gtcagtcctttcgcgcctcggcggcgcggcatagcccggctcggcctgtaaagcagtctcaagcctgccgcagggagaagatggcggtcgccgtragaactttgcaggaacagctggaaaaggccaaagagagtcttaagaacgtggatgagaacattcgcaagctcaccgggcgggatccgaatgacgtgaggc

SEQ ID NO: 5735 - DNA, 201 bp, Homo sapiens
aagaatctgagccccaacctgagcctgtggctcaacctcagcctcagtctcagccccagcttcagcttcaatcccagtcccaaccagtactccagtcccakcctccctctcagcctgaggatttgtcattagctgttttacagccaacaccccaagttactcaggagcaagggcatttactacctgagaggaaggattttc

SEQ ID NO: 5736 - DNA, 201 bp, Homo sapiens
cccaacctgagcctgtggctcaacctcagcctcagtctcagccccagcttcagcttcaatcccagtcccaaccagtactccagtcccagcctccctctcarcctgaggatttgtcattagctgttttacagccaacaccccaagttactcaggagcaagggcatttactacctgagaggaaggattttcctgtagagtctg

SEQ ID NO: 5737 - DNA, 201 bp, Homo sapiens
aatcccagtcccaaccagtactccagtcccagcctccctctcagcctgaggatttgtcattagctgttttacagccaacaccccaagttactcaggagcawgggcatttactacctgagaggaaggattttcctgtagagtctgtaaaactcactgaggtaccagtagagccagtcttgacagtacatccagagagcaaga

SEQ ID NO: 5738 - DNA, 201 bp, Homo sapiens
aactaatcgagttgaaagtgtagaaccttcagaaaatgaagctagcaaagaattggaaccagaaatggaatttgaaattgagccagataaagaatgtaaawccctttctcctgggaaagagaatgtcagtgctttagacatggaaaaggagtctgaggaaaaagaagaaaaagaatctgagccccaacctgagcctgtggc

SEQ ID NO: 5739 - DNA, 201 bp, Homo sapiens
gcagtagttccagtagcagctccagtacaagtggcagcagcagcagagatagtagcagtagcactagtagtagtagtgagagtagaagtcggagtaggggycggggacataatagagatagaaagcacagaaggagcgtggatcggaagagaagggatacttcaggactagaaagaagtcacaaatcttcaaaaggtggta

SEQ ID NO: 5740 - DNA, 201 bp, Homo sapiens
aaactgaggtaagggaaagtgagaagcagcaggatagtcagcctgaagaagttatggatgtgctagagatggttgagaatgtcaaacatgtaattgctgascaggaggtaatggaaactaatcgagttgaaagtgtagaaccttcagaaaatgaagctagcaaagaattggaaccagaaatggaatttgaaattgagccag

SEQ ID NO: 5741 - DNA, 201 bp, Homo sapiens
attctttgcagcagaagatttcttgataaaaaaggattacctttccttgtaaagaggatgctgccttaagaattgcatgttgtaaaaaatctttttggaaratacagactgtttgtttaccagacattcttgtactttttgcataattttgtaagagttatttatcaaaattatgtgaggttccaaaatatgtaaaaatga

SEQ ID NO: 5742 - DNA, 201 bp, Homo sapiens
ccggggacataatagagatagaaagcacagaaggagcgtggatcggaagagaagggatacttcaggactagaaagaagtcacaaatcttcaaaaggtggtrgtagtagagatacaaaaggatcaaaggataagaattcccggtccgacagaaagaggtctatatcagagagtagtcgatcaggcaaaagatcttcaagaag

SEQ ID NO: 5743 - DNA, 201 bp, Homo sapiens
caaaggataagaattcccggtccgacagaaagaggtctatatcagagagtagtcgatcaggcaaaagatcttcaagaagtgaaagagaccgaaaatcagayaggaaagacaaaaggcgttaatggaagaagccaggctttcttagccattctttgcagcagaagatttcttgataaaaaaggattacctttccttgtaaag

SEQ ID NO: 5744 - DNA, 201 bp, Homo sapiens
agaagtgaaagagaccgaaaatcagacaggaaagacaaaaggcgttaatggaagaagccaggctttcttagccattctttgcagcagaagatttcttgatraaaaaggattacctttccttgtaaagaggatgctgccttaagaattgcatgttgtaaaaaatctttttggaaaatacagactgtttgtttaccagacatt

SEQ ID NO: 5745 - DNA, 201 bp, Homo sapiens
atctggcctaggggaggggaagggaggcccacttccttctttgggcacaggaaacattggcctgtggctgtccctcaaatggcggcagtctctagagggcygtggcccttcccctgaggtcttttggcctagctctgtacaaccaggacacaggaagccctgctgggctagcctgaggcctagtctctgcttggtccccga

SEQ ID NO: 5746 - DNA, 201 bp, Homo sapiens
aacgaggtcatggacgcctttcgcaagatcatggctgcccggcagaagaagcggactcccaccaagaaagaaaaggaccaggcctggaagactctgaaggrgcgtgagagcatcctgaagctgctggatgggtagccctcacccctgcctcaggctgattatctggcctaggggaggggaagggaggcccacttccttctt

SEQ ID NO: 5747 - DNA, 201 bp, Homo sapiens
gctgacaacgaggtcatggacgcctttcgcaagatcatggctgcccggcagaagaagcggactcccaccaagaaagaaaaggaccaggcctggaagactcwgaaggagcgtgagagcatcctgaagctgctggatgggtagccctcacccctgcctcaggctgattatctggcctaggggaggggaagggaggcccacttc

SEQ ID NO: 5748 - DNA, 201 bp, Homo sapiens
ggactcccaccaagaaagaaaaggaccaggcctggaagactctgaaggagcgtgagagcatcctgaagctgctggatgggtagccctcacccctgcctcakgctgattatctggcctaggggaggggaagggaggcccacttccttctttgggcacaggaaacattggcctgtggctgtccctcaaatggcggcagtctct

SEQ ID NO: 5749 - DNA, 201 bp, Homo sapiens
tctggcctaggggaggggaagggaggcccacttccttctttgggcacaggaaacattggcctgtggctgtccctcaaatggcggcagtctctagagggccrtggcccttcccctgaggtcttttggcctagctctgtacaaccaggacacaggaagccctgctgggctagcctgaggcctagtctctgcttggtccccgag

SEQ ID NO: 5750 - DNA, 201 bp, Homo sapiens
ttctatcttgggaattatttcagattggcttctgtgtgtgtgtcttagttctttttggacctgtctcccttactagagtgtgaagtacaggttttatcttygttgtactttcttacctacacctgacactgggcttggccttggactagggacttgagagagatataagataggtaagtgaatgaatgaatgaagcatggc

SEQ ID NO: 5751 - DNA, 201 bp, Homo sapiens
tctctcgagaggcaattgctgtgacctgagacaatctgtgtacgtattctgcaccttctatcttgggaattatttcagattggcttctgtgtgtgtgtctkagttctttttggacctgtctcccttactagagtgtgaagtacaggttttatcttcgttgtactttcttacctacacctgacactgggcttggccttggac

SEQ ID NO: 5752 - DNA, 201 bp, Homo sapiens
ccgcagcgaggaggtagagggggcgggggtcgcactagggtgtccctagagaacgaggactctgaaggcgggacatttgggcgacccccgggcggggccarccattaaacagtcccacttctgtgccagacactgaactgggctcttgacgggcatcatctcttaatcctcagaacatcccagggagctccacaggatccc

SEQ ID NO: 5753 - DNA, 201 bp, Homo sapiens
cccgcagctcctggcgctcggcggggctaactgcagcgcggagatctcggccgccaagctccgcctcccgccccgggctgtgccccggggctcgcctgagkccgaccacccgcaccccacctctagcggctttgctcgaggcccaccttcttcccacccccggcaaactccagtaggctcgccctcgctgactccccgccc

SEQ ID NO: 5754 - DNA, 201 bp, Homo sapiens
cgaacgcttgggccttccggaagttttccacctagggctgtctcggtatttttaaattcttgcactcgagtcactatttaagctcctccaggaatgggtgyagcttccctttgtgccttcggccttcttgtcacctttgccacagcctcccccaggtatgcaatggtacagcccagcttcagattgggcaccaaattagga

SEQ ID NO: 5755 - DNA, 201 bp, Homo sapiens
aagcggacgagcccttcgtttcttccggttctgtacccccatcctttctctcgcccctcctacccgcagctcctggcgctcggcggggctaactgcagcgsggagatctcggccgccaagctccgcctcccgccccgggctgtgccccggggctcgcctgaggccgaccacccgcaccccacctctagcggctttgctcga

SEQ ID NO: 5756 - DNA, 201 bp, Homo sapiens
gttttccacctagggctgtctcggtatttttaaattcttgcactcgagtcactatttaagctcctccaggaatgggtgcagcttccctttgtgccttcggycttcttgtcacctttgccacagcctcccccaggtatgcaatggtacagcccagcttcagattgggcaccaaattaggacaagccgaagcggacgagccct

SEQ ID NO: 5757 - DNA, 201 bp, Homo sapiens
ttcctgaagctgggtcgagaccatgaacttggagctccccccaaacatgggaagcccaagaagcagaaactggaagggaaggcaggacatgggccgggccrtggcccaggacggcccaaatccaaaaaccttcagcccaagatccaggaatatgaattcactgatgaccctatcgacgtgccacggatccccaaaaatgat

SEQ ID NO: 5758 - DNA, 140 bp, Homo sapiens
caccatcgcgggcgctggctgggccggaaagcggaagtayggaagtggccagccccgcgatgcctgccctttcgcgagaagcgcagctacggtctccgcccggacttccggacggtaccatctatgctccgagcggggta

SEQ ID NO: 5759 - DNA, 201 bp, Homo sapiens; identical to SEQ ID NO: 5752

SEQ ID NO: 5760 - DNA, 201 bp, Homo sapiens; identical to SEQ ID NO: 5753

SEQ ID NO: 5761 - DNA, 201 bp, Homo sapiens; identical to SEQ ID NO: 5754

SEQ ID NO: 5762 - DNA, 201 bp, Homo sapiens; identical to SEQ ID NO: 5755

SEQ ID NO: 5763 - DNA, 201 bp, Homo sapiens; identical to SEQ ID NO: 5756

SEQ ID NO: 5764 - DNA, 201 bp, Homo sapiens; identical to SEQ ID NO: 5757

SEQ ID NO: 5765 - DNA, 140 bp, Homo sapiens; identical to SEQ ID NO: 5758

SEQ ID NO: 5766 - DNA, 201 bp, Homo sapiens; identical to SEQ ID NO: 5747

SEQ ID NO: 5767 - DNA, 201 bp, Homo sapiens; identical to SEQ ID NO: 5756

SEQ ID NO: 5768 - DNA, 201 bp, Homo sapiens; identical to SEQ ID NO: 5745

SEQ ID NO: 5769 - DNA, 201 bp, Homo sapiens; identical to SEQ ID NO: 5746

SEQ ID NO: 5770 - DNA, 201 bp, Homo sapiens; identical to SEQ ID NO: 5752

SEQ ID NO: 5771 - DNA, 201 bp, Homo sapiens; identical to SEQ ID NO: 5754

SEQ ID NO: 5772 - DNA, 201 bp, Homo sapiens; identical to SEQ ID NO: 5748

SEQ ID NO: 5773 - DNA, 201 bp, Homo sapiens; identical to SEQ ID NO: 5753

SEQ ID NO: 5774 - DNA, 201 bp, Homo sapiens; identical to SEQ ID NO: 5755

SEQ ID NO: 5775 - DNA, 201 bp, Homo sapiens; identical to SEQ ID NO: 5757

SEQ ID NO: 5776 - DNA, 201 bp, Homo sapiens; identical to SEQ ID NO: 5749

SEQ ID NO: 5777 - DNA, 140 bp, Homo sapiens; identical to SEQ ID NO: 5758

SEQ ID NO: 5778 - DNA, 166 bp, Homo sapiens
cgggagatggacggccgccgtgttttgggccggttctggagtggctggcggcggggcctgggtgtscgcccagtgcccgaggacgcaggctttggcaccgaagcccggtgattaagtaccccctctctcatgcgggacggaggctagggcagggggaaggcacgtg

SEQ ID NO: 5779 - DNA, 201 bp, Homo sapiens
ttcgaggacctctagtgacgttgaacaagccacagggtctaccagtgacaggtatgggccggggatgtgggaagggaatgcagcggaagggggtttcgtgwctgagggagggaaaagtgaaggcatgaagctttggcctcttgtaatttttctttcttactttccaggaaaaccaggagagctgacgttgttctcagtgct

SEQ ID NO: 5780 - DNA, 192 bp, Homo sapiens
cctcttgtaatttttctttcttactttccaggaaaaccaggagagctgacgttgttctcagtgctgccagagctgagccagtccctagggctcagggagcrggagcttcaggttgtccgagcatctgggaagtaagtggtaggggtgacaggaagctaggagtacaggcatccatctgtggtggggaaacag

SEQ ID NO: 5781 - DNA, 201 bp, Homo sapiens
ggcagggggaaggcacgtgcgggatctggatcaggtagatgttacccgaaaacagccccgttggcctctctgagcctcggtgccctccgctgtagaatggraccggtcgtacctgaattttcgaggacctctagtgacgttgaacaagccacagggtctaccagtgacaggtatgggccggggatgtgggaagggaatgca

SEQ ID NO: 5782 - DNA, 102 bp, Homo sapiens
csggagatggacggccgccgtgttttgggccggttctggagtggctggcggcggggcctgggtgtccgcccagtgcccgaggacgcaggctttggcaccgaa

SEQ ID NO: 5783 - DNA, 201 bp, Homo sapiens
tgcccctctggacgcacatgcgcgctgtcctggctcgggagatggacggccgccgtgttttgggccggttctggagtggctggcggcggggcctgggtgtscgcccagtgcccgaggacgcaggctttggcaccgaagcccggcatcagaggcaaccccgcggctcctgccaacggtcggggcccctcggggaccagccct

SEQ ID NO: 5784 - DNA, 201 bp, Homo sapiens
tccccagacagctagtcgcctccagaagtacttcacccatgcacggagagcccaaaggcccacagccacctactgtgctgtcactgatgggatcccagctscttctgaggggaagatccaggctgccctgaaactggaacacattgatggggtcaatctcacagttccagtgaaggccccatcccgaaaggacatcctgga

SEQ ID NO: 5785 - DNA, 201 bp, Homo sapiens
ttgaacaagccacagggtctaccagtgacaggaaaaccaggagagctgacgttgttctcagtgctgccagagctgagccagtccctagggctcagggagcrggagcttcaggttgtccgagcatctgggaaagaaagctctgggcttgtactcctctccagctgtccccagacagctagtcgcctccagaagtacttcacc

SEQ ID NO: 5786 - DNA, 170 bp, Homo sapiens
tgaccaatcagcgcgctggctggagcgcgggtctgcccctctggacgcacatgcgcgctgtcctggctcsggagatggacggccgccgtgttttgggccggttctggagtggctggcggcggggcctgggtgtccgcccagtgcccgaggacgcaggctttggcaccgaa

SEQ ID NO: 5787 - DNA, 114 bp, Homo sapiens
ctggaggccaaggcaagaggatcacttgagcccaggagttcgagaccagcctgggcaaaatagaccccatctctggaaaaacaacaacaaaactttccgcrtggtggctcatgc

SEQ ID NO: 5788 - DNA, 201 bp, Homo sapiens; identical to SEQ ID NO: 5783

SEQ ID NO: 5789 - DNA, 201 bp, Homo sapiens
ttgaacaagccacagggtctaccagtgacaggaaaaccaggagagctgacgttgttctcagtgctgccagagctgagccagtccctagggctcagggagcrggagcttcaggttgtccgagcatctgggaagtaagtggtaggggtgacaggaagctaggagtacaggcatccatctgtggtggggaaacagctgcttggg

SEQ ID NO: 5790 - DNA, 170 bp, Homo sapiens; identical to SEQ ID NO: 5786

SEQ ID NO: 5791 - DNA, 201 bp, Homo sapiens
ggcggcatagcgcacagcgcgccttagcagcagcagcagcagcagcagcatcggaggtacccccgccgtcgcagcccccgcgctggtgcagccaccctcgytccctctgctcttcctcccttcgctcgcaccatggctgatcagctgaccgaagaacagattgctgaattcaaggaagccttctccctatttgataaagat

SEQ ID NO: 5792 - DNA, 201 bp, Homo sapiens
gtgtcgtggacgccgtgccgttactcgtagtcaggcggcggcgcaggcggcggcggcggcatagcgcacagcgcgccttagcagcagcagcagcagcagcrgcatcggaggtacccccgccgtcgcagcccccgcgctggtgcagccaccctcgctccctctgctcttcctcccttcgctcgcaccatggctgatcagctg

SEQ ID NO: 5793 - DNA, 201 bp, Homo sapiens
atgcagcttgacgattgagcacagtcaggcctttgtattaaaaatgaaaaatgaaaaaacaaattcaaaacctattcaaatgggttctagttcaatttgtytagtataaattgtcatagctggtttactgaaaacaaacacatttaaaattggtttacctcaggatgacgtggtcctcttgtacttcgtgtgctccgaccc

SEQ ID NO: 5794 - DNA, 201 bp, Homo sapiens
ctagagtgaaacaggtgtcaggctgtcactgttcacacaaatttttaataagaaacatttaccaagggagcatctttggactctctgtttttaaaaccttytgaaccatgacttggagccggcagagtaggctgtggctgtggacttcagcacaaccatcaacattgctgttcaaagaaattacagtttacgtccattcca

SEQ ID NO: 5795 - DNA, 201 bp, Homo sapiens
ccggcagagtaggctgtggctgtggacttcagcacaaccatcaacattgctgttcaaagaaattacagtttacgtccattccaagttgtaaatgctagtcttttttttttttttttccaataaaaagaccattaacttaaagtggtgttaaatgctttgtaaagctgagatctaaatggggacaaggcaggtggaggggag

SEQ ID NO: 5796 - DNA, 192 bp, Homo sapiens
cagcattgggtttccctcccaaggccccagcaccaacctctgagcccaagaccttgcctgaaaacaagcagataccgattgcttcatcctatttatggacrtgtaggtctagttgcattttcactggggggaggggggaaggtgaattatggtaacttttaatgatctattcaggcagtagagctcttaagg

SEQ ID NO: 5797 - DNA, 157 bp, Homo sapiens
cgctccggcagtggtgctgggagtgtcgtggacgccgtgccgttactcgtagtcagkcggcggcgcaggcggcggcggcggcatagcgcacagcgcgccttagcagcagcagcagcagcagcagcatcggaggtacccccgccgtcgcagcccccgc

SEQ ID NO: 5798 - DNA, 186 bp, Homo sapiens
cgctccggcagtggtgctgggagtgtcgtggacgccgtgccgttactcgtagtcaggcggcggcgcaggcggcggcggcggcatakcgcacagcgcgccttagcagcagcagcagcagcagcagcatcggaggtacccccgccgtcgcagcccccgcgctggtgcagccaccctcgctccctctgc

SEQ ID NO: 5799 - DNA, 141 bp, Homo sapiens
cgctccggcagtggtgctgggagtgtcgtggacgccgtgcygttactcgtagtcaggcggcggcgcaggcggcggcggcggcatagcgcacagcgcgccttagcagcagcagcagcagcagcagcatcggaggtacccccg

SEQ ID NO: 5800 - DNA, 201 bp, Homo sapiens
caggctgctagcaaggcagtgagaagctcttggcagccaaatgggtgcattcagggctgatttatagagacccttggcttctccttctcctactccctgtytttctggcattttgtagcttgttagattttctgccagaggggtgggtcagagcagtggaggggagacatcgcccatgtgcttctgctactggtccttggg

SEQ ID NO: 5801 - DNA, 201 bp, Homo sapiens; identical to SEQ ID NO: 5791

SEQ ID NO: 5802 - DNA, 201 bp, Homo sapiens; identical to SEQ ID NO: 5792

SEQ ID NO: 5803 - DNA, 201 bp, Homo sapiens
atgcagcttgacgattgagcacagtcaggcctttgtattaaaaatgaaaaatgaaaaaacaaattcaaaacctattcaaatgggttctagttcaatttgtytagtataaattgtcatagctggtttactgaaaacaaacacatttaaaattggtttacctcaggatgacgtgcagaaaaatgggtgaaggataaaccgttg

SEQ ID NO: 5804 - DNA, 201 bp, Homo sapiens; identical to SEQ ID NO: 5794

SEQ ID NO: 5805 - DNA, 201 bp, Homo sapiens; identical to SEQ ID NO: 5795

SEQ ID NO: 5806 - DNA, 201 bp, Homo sapiens
cagcattgggtttccctcccaaggccccagcaccaacctctgagcccaagaccttgcctgaaaacaagcagataccgattgcttcatcctatttatggacrtgtaggtctagttgcattttcactggggggaggggggaaggtgaattatggtaacttttaatgatctattcaggcagtagagctcttaaggaaaaaaaaa

SEQ ID NO: 5807 - DNA, 201 bp, Homo sapiens
ggtagaagcagtagtcacttttgtaagccagtctcttcatgcctaaaagacactaccagtcacctttgattcgcgacttttaatttatgattatacttagcctcctcctcctttttttttttttcccaagttgacttgactttgcttttttccccccaagtagaactaatgctagcttccagcttgaaagtaaaactccag

SEQ ID NO: 5808 - DNA, 201 bp, Homo sapiens
gtagaagcagtagtcacttttgtaagccagtctcttcatgcctaaaagacactaccagtcacctttgattcgcgacttttaatttatgattatacttagcctcctcctcctttttttttttttcccaagttgacttgactttgcttttttccccccaagtagaactaatgctagcttccagcttgaaagtaaaactccagt

SEQ ID NO: 5809 - DNA, 201 bp, Homo sapiens
tctaaccctcaagtctttagaagctgggtggactcttagtggtcctgcagcgtatcctaaaagactacctttgaaacaggattcttgtatggccaggatcstgtctgggaaccagaaaccctacaccctccccctccagggaatgctgagttccagttttgagcagaggtgaggcagaatccactgtagccttccgccctg

SEQ ID NO: 5810 - DNA, 187 bp, Homo sapiens
aagttgcccttcaccatggctatttgaaaaggagatgtacttggacgtttctgtaaatcttgagataaactgtttggagatttaaccacctctctgatggrggaccaactctatggaaattgtaaatacgttttatttataaacctggcactgtattcaataaacatttctgcagcctttcatctct

SEQ ID NO: 5811 - DNA, 201 bp, Homo sapiens
tagaagcagtagtcacttttgtaagccagtctcttcatgcctaaaagacactaccagtcacctttgattcgcgacttttaatttatgattatacttagcckcctcctcctttttttttttttcccaagttgacttgactttgcttttttccccccaagtagaactaatgctagcttccagcttgaaagtaaaactccagtg

SEQ ID NO: 5812 - DNA, 201 bp, Homo sapiens
gccagtctcttcatgcctaaaagacactaccagtcacctttgattcgcgacttttaatttatgattatacttagcctcctcctcctttttttttttttccsaagttgacttgactttgcttttttccccccaagtagaactaatgctagcttccagcttgaaagtaaaactccagtgtggagtgaattttgtgtctaatta

SEQ ID NO: 5813 - DNA, 201 bp, Homo sapiens
gtccctgtaaaaccccctttaaaagcatattgcatttagtacagagctcttttttgaaatgaaggctggagatgtgcatttttcacggtgttaactggttrtatcttattagcaaggagattggggttttgagtgtttgcgtgggtggtttcaatttgccagggaacagtggcaggctgctagcaaggcagtgagaagctc

SEQ ID NO: 5814 - DNA, 201 bp, Homo sapiens
tagtcacttttgtaagccagtctcttcatgcctaaaagacactaccagtcacctttgattcgcgacttttaatttatgattatacttagcctcctcctcctttttttttttttcccaagttgacttgactttgcttttttccccccaagtagaactaatgctagcttccagcttgaaagtaaaactccagtgtggagtgaa

SEQ ID NO: 5815 - DNA, 201 bp, Homo sapiens
ggcatcctgctttagcctgagacttgccataagaaactgctgagtacttggcaaaccctttcatagttttgttctccatctgtttggggtaggtgttgagygaggcaaatggatctcgatatttcagatgggcttttgatgcactgttgccaaggaaggctttttctgattttttgacaaatgaatttttgcacactttca

SEQ ID NO: 5816 - DNA, 157 bp, Homo sapiens; identical to SEQ ID NO: 5797

SEQ ID NO: 5817 - DNA, 186 bp, Homo sapiens; identical to SEQ ID NO: 5798

SEQ ID NO: 5818 - DNA, 141 bp, Homo sapiens; identical to SEQ ID NO: 5799

SEQ ID NO: 5819 - DNA, 201 bp, Homo sapiens
ccttctcctactccctgtctttctggcattttgtagcttgttagattttctgccagaggggtgggtcagagcagtggaggggagacatcgcccatgtgctkctgctactggtccttgggctgggtggttggtagaggagatgttgacactatgagctaagggttggcttttgtaattacctgaatctgaaaggaatgccta

SEQ ID NO: 5820 - DNA, 201 bp, Homo sapiens
gttgcccatccaggatgctcagaagcagattccagtgtaaaaacgagaaaaacaaaatgaaagaggggaagaagatgagagacctgcaaatccagcgccasagaagccaggtgaccagggacccgcgggctcgggttgccgtttcccgccccaccccgcggccggcctggcttcactggcgccctttggccgcgaccacgg

SEQ ID NO: 5821 - DNA, 201 bp, Homo sapiens
cacactcagccaggcccgcgggcatctgctgcgtgtcccgctccgggctcagtgccctcgccgccgccggcactgcctcgatgttccagctgcccatcttraatttcagcccccagcaagtggccggggtatgtgagaccctggaagagagcggcgatgtggagcgcctgggtcgcttcctctggtcgctgcccgtggccc

SEQ ID NO: 5822 - DNA, 201 bp, Homo sapiens
catgaagtgtcaacagctttcaggagcaatttaggaagccaaactatgggactcaataagtgagtcctattttctaaaaatgcaaaactatcctgactcargctctgcagcaagaaaggctttctgtctccttcaaggccccctccaatacaaaagcagcaggcacccatgatcatgctagagtgagcatatactgcattt

SEQ ID NO: 5823 - DNA, 201 bp, Homo sapiens
tcgcccgctcccggccgttgagccaccgccgccacccggtagtgtgtcccgctgccccaatccgcctcatcaacaagcgcctggcacactcagccaggccygcgggcatctgctgcgtgtcccgctccgggctcagtgccctcgccgccgccggcactgcctcgatgttccagctgcccatcttgaatttcagcccccagc

SEQ ID NO: 5824 - DNA, 201 bp, Homo sapiens
cccaccccaatagcggagccagctcgcctgccggcgtgcctgagccgagccgagcccgaaccccaagccgcggagccagcacctcctccagtcggggtcgyccgctcccggccgttgagccaccgccgccacccggtagtgtgtcccgctgccccaatccgcctcatcaacaagcgcctggcacactcagccaggcccgcg

SEQ ID NO: 5825 - DNA, 201 bp, Homo sapiens
cggctgcagccaagaacagactccagcagcaggtcctgtcacagggttccgggcgggcactacgggcggagggcgacggcacgccagaggtgctgggcgtygccaccagcccggccgccagtctatccagcaaggcggccacttcagccatctccatcacgtccagcgacagcgagtgcgacatctgagttgcccatccag

SEQ ID NO: 5826 - DNA, 201 bp, Homo sapiens
gggacctgtggacaagtaccgagtaaggaagaagttcccgctgccgcgcaccatttgggacggcgaacagaagacacactgcttcaaggagcgcacgcggmacctgctacgcgagtggtacctgcaggatccataccctaaccccagcaaaaaacgtgagctcgcccaggcaaccggactgacccctacgcaggtgggcaa

SEQ ID NO: 5827 - DNA, 201 bp, Homo sapiens
actcagctacaactcagagatttccacagtcagtggtgacaactcctatgagcagaggtcctgaggatgtgtcatggccaagcccgctgtctgtggaaaamaacagccctccatcttccctggtatcttcatcttcagtaacctcaccttcgccactttattccacaccatctgggagtagccactcctctcctgtccctg

SEQ ID NO: 5828 - DNA, 201 bp, Homo sapiens
tggctgaaacctctatttccacatcaatgcctgctaattttgagaccacaggatttgaggctgagccattttctcatttgacttctggatttaggaagacmaacatgtccctggacaccagctcagtcacaccaacaaatacaccttcttctcctgggtccactcaccttttacagagttccaagactgatttcacctctt

SEQ ID NO: 5829 - DNA, 201 bp, Homo sapiens
ctctatcatgatgaaggccacagacatgttggatgcaagtttggaacctgagaccacttcagctcccaatatgaatatcacctcagatgagagtctggccrcttctaaagccaccacggagacagaggcaattcacgtttttgaaaatacagcagcgtcccatgtggaaaccaccagtgctacagaggaactctattcctc

SEQ ID NO: 5830 - DNA, 201 bp, Homo sapiens
tccctcttccatggctgaaacctctatttccacatcaatgcctgctaattttgagaccacaggatttgaggctgagccattttctcatttgacttctggayttaggaagaccaacatgtccctggacaccagctcagtcacaccaacaaatacaccttcttctcctgggtccactcaccttttacagagttccaagactga

SEQ ID NO: 5831 - DNA, 201 bp, Homo sapiens
atccactcggagccatccaaggctacatacccagtgggtactccctcttccatggctgaaacctctatttccacatcaatgcctgctaattttgagaccayaggatttgaggctgagccattttctcatttgacttctggatttaggaagaccaacatgtccctggacaccagctcagtcacaccaacaaatacaccttct

SEQ ID NO: 5832 - DNA, 201 bp, Homo sapiens
ggagactagcacctcccagaaaattggctcatcctcagacacaagcacggtctttgacaaagcattcactgctgctactactgaggtctccagaacagaaytcacctcctctagcagaacatccatccaaggcactgaaaagcccacaatgtcaccggacacctccacaagatctgtcaccatgctttctacttttgctgg

SEQ ID NO: 5833 - DNA, 201 bp, Homo sapiens
ctctaaattcacttctccagcaactagttccatggaagcaacttctatcagggaaccatcaacaaccatcctcacaacagagaccacgaatggcccaggcwctatggctgtggcttctaccaacatcccaattggaaagggctacattactgaaggaagattggacacaagccatctgcccattggaaccacagcttcctc

SEQ ID NO: 5834 - DNA, 201 bp, Homo sapiens
accagtacctctcaggagtccagctttcccacggacacaagttttctactttccaaagtccccactggtactattactgaggtctccagtacaggggtcawctcttctagcaaaatttccaccccagaccatgataagtccacagtgccacctgacaccttcacaggagagatccccagggtcttcacctcctctattaag

SEQ ID NO: 5835 - DNA, 201 bp, Homo sapiens
tgaggacctccagttctgttcatgaatctcattcctctgtcctagctgactcagaaacaaccataaccataccttcaatgggtatcacctccgctgtggasgataccactgttttcacatcaaatcctgccttctctgagactaggaggattccgacagagccaacattctcattgactcctggattcagggagactagca

SEQ ID NO: 5836 - DNA, 201 bp, Homo sapiens
gataaatccaaacataaaaccgagacatgggtaagcaccacagccattccctccactgtcctgaataataagataatggcagctgaacaacagacaagtcratctgtggatgaggcttattcatcaactagttcttggtcagatcagacatctgggagtgacatcacccttggtgcatctcctgatgtcacaaacacatta

SEQ ID NO: 5837 - DNA, 201 bp, Homo sapiens
ctcaacattaccaaagaccattcacaccactccttctcctatgacctcactgctcacccctagcctagtgatgaccacagacacattgggcacaagcccaraacctacaaccagttcacctccaaatttgagcagtacctcacatgagatactgacaacagatgaagacaccacagctatagaagccatgcatccttccac

SEQ ID NO: 5838 - DNA, 201 bp, Homo sapiens
ctccaaccacttcccccatagttctcactgctagtttcacagagaccagcacagtttcactggataatgaaactacagtaaaaacctcagatatccttgasgcacggaaaacaaatgagctcccctcagatagcagttcttcttctgatctgatcaacacctccatagcttcttcaactatggatgtcactaaaacagcct

SEQ ID NO: 5839 - DNA, 201 bp, Homo sapiens
gctgagactatttccactggcacagtgatgccttctctatcagaggccatgacttcatttgccaccactggagttccacgagccatctcaggttcaggtartccattctctaggacagagtcaggccctggggatgctactctgtccaccattgcagagagcctgccttcatccactcctgtgccattctcctcttcaacc

SEQ ID NO: 5840 - DNA, 201 bp, Homo sapiens
tcctggtgaactagaaaccacaccttcaatggccaccagtcatggggcagaagccagctcagctgttccaactccaactgtttcacctggggtatcaggartggtgacccctctggtcactagttccagggcagtgaccagtacaactattccaattctaactctttcttctagtgagccagagaccacaccttcaatggc

SEQ ID NO: 5841 - DNA, 201 bp, Homo sapiens
ttggcccagtgaagaccacagacatgttgcgcacaagctcagaacctgaaaccagttcacctccaaatttgagcagcacctcagctgaaatattagccacstctgaagtcaccaaagatagagagaaaattcatccctcctcaaacacacctgtagtcaatgtagggactgtgatttataaacatctatccccttcctctg

SEQ ID NO: 5842 - DNA, 201 bp, Homo sapiens
agtcatgtcctctagcagaggacctagccctgatcagtccacaatgtcacaagacatatccactgaagtgatcaccaggctctctacctcccccatcaagrcagaatctacagaaatgaccattaccacccaaacaggttctcctggggctacatcaaggggtacccttaccttggacacttcaacaacttttatgtcagg

SEQ ID NO: 5843 - DNA, 201 bp, Homo sapiens
tactggctgcctctgaagtcaccacagatacagagaaaattcatccttcttcaagcatggcagtgaccaatgtgggaaccaccagttctggacatgaactrtattcctctgtttcaatccactcggagccatccaaggctacatacccagtgggtactccctcttccatggctgaaacctctatttccacatcaatgcctg

SEQ ID NO: 5844 - DNA, 201 bp, Homo sapiens
agtgagccagagaccacaccttcaatggccaccagtcatggggtagaagccagctcagctgttctaactgtttcacctgaggtaccaggaatggtgacctytctggtcactagttctagagcagtaaccagtacaactattccaactctgactatttcttctgatgaaccagagaccacaacttcattggtcacccattct

SEQ ID NO: 5845 - DNA, 201 bp, Homo sapiens
ttggcaaggacccactcaactgttcctcctagatttttacactcagagatgacaactcttatgagtaggagtcctgaaaatccatcatggaagagctctcyctttgtggaaaaaactagctcttcatcttctctgttgtccttacctgtcacgacctcaccttctgtttcttccacattaccgcagagtatcccttcctcc

SEQ ID NO: 5846 - DNA, 201 bp, Homo sapiens
ccatccaaggctacatacccagtgggtactccctcttccatggctgaaacctctatttccacatcaatgcctgctaattttgagaccacaggatttgaggytgagccattttctcatttgacttctggatttaggaagaccaacatgtccctggacaccagctcagtcacaccaacaaatacaccttcttctcctgggtcc

SEQ ID NO: 5847 - DNA, 201 bp, Homo sapiens
actattccaactctgactatttcttctgatgaaccagagaccacaacttcattggtcacccattctgaggcaaagatgatttcagccattccaactttagstgtctcccctactgtacaagggctggtgacttcactggtcactagttctgggtcagagaccagtgcgttttcaaatctaactgttgcctcaagtcaacca

SEQ ID NO: 5848 - DNA, 201 bp, Homo sapiens
ccaccatggagacagaggcaattcagctttcagaaaacacagctgtgactcagatgggcaccatcagtgctagacaagaattctattcctcttatccaggyctcccagagccatccaaagtgacatctccagtggtcacctcttccaccataaaagacattgtttctacaaccatacctgcttcctctgagataacaagaa

SEQ ID NO: 5849 - DNA, 201 bp, Homo sapiens
tctttatctgcagtaacctcaccttcgccactttattccacaccatctgagagtagccactcgtctcctctccgggtgacttctcttttcacccctgtcaygatgaagaccacagacatgttggacacaagcttggaacctgtgaccacttcacctcccagtatgaatatcacctcagatgagagtctggccacttctaaa

SEQ ID NO: 5850 - DNA, 201 bp, Homo sapiens
tcagggctggtgaagaccacagagctgttgggcacaagctcagaacctgaaaccagttcacccccaaatttgagcagcacctcagctgaaatactggccaycactgaagtcactacagatacagagaaactggagatgaccaatgtggtaacctcaggttatacacatgaatctccttcctctgtcctagctgactcagtg

SEQ ID NO: 5851 - DNA, 201 bp, Homo sapiens
cagcaccaggtacatgggccagtgtaggcagtactactgacttacctgccatgggctttctcaagacaagtcctgcaggagaggcacactcacttctagcrtcaactattgaaccagccactgccttcactcctcatctctcagcagcagtggtcactggatccagtgctacatcagaagccagtcttctcactacgagtg

SEQ ID NO: 5852 - DNA, 201 bp, Homo sapiens
ctactgacttacctgccatgggctttctcaagacaagtcctgcaggagaggcacactcacttctagcgtcaactattgaaccagccactgccttcactccycatctctcagcagcagtggtcactggatccagtgctacatcagaagccagtcttctcactacgagtgaaagcaaagccattcattcttcaccacagaccc

SEQ ID NO: 5853 - DNA, 201 bp, Homo sapiens
gatagagtcaatgtcatctctgacccctggactgagggagaccagaacctcccaggacatcacctcatccacagagacaagcactgtcctttacaagatgycctctggtgccactcctgaggtctccaggacagaagttatgccctctagcagaacatccattcctggccctgctcagtccacaatgtcactagacatctc

SEQ ID NO: 5854 - DNA, 201 bp, Homo sapiens
caagtttggaacctgagaccacttcagctcccaatatgaatatcacctcagatgagagtctggccgcttctaaagccaccacggagacagaggcaattcasgtttttgaaaatacagcagcgtcccatgtggaaaccaccagtgctacagaggaactctattcctcttccccaggcttctcagagccaacaaaagtgatat

SEQ ID NO: 5855 - DNA, 201 bp, Homo sapiens
gagccagcacaatgcccaactcagctatccctttttccatgacactaagcaatgcagaaacaagtgccgaaagggtcagaagcacaatttcctctctgggkactccatcaatatccacaaagcagacagcagagactatccttaccttccatgccttcgctgagaccatggatatacccagcacccacatagccaagactt

SEQ ID NO: 5856 - DNA, 201 bp, Homo sapiens
ggaccccaccacctacatcaccactacggatcctaaggatacaagttcagctcaggtctctacaccccactcagtgaggacactcagaaccacagaaaacyatccaaagacagagtccgccaccccagctgcttactctggaagtcctaaaatctcaagttcacccaatctcaccagtccggccacaaaagcatggaccat

SEQ ID NO: 5857 - DNA, 201 bp, Homo sapiens
aagggggacttccaaccctcagcacctaccctgaatcaacaaacacacccagcatccacctcggagcacacgctagttcagaaagtccaagcaccatcaamcttaccatggcttcagtagtaaaacctggctcttacacacctctcaccttcccctcaatagagacccacattcatgtatcaacagccagaatggcttact

SEQ ID NO: 5858 - DNA, 201 bp, Homo sapiens
atggaaaccatcactagaatttctacccccctcacaaggaaagaatcaacagacatggccatcacccccaaaacaggtccttctggggctacctcgcaggrtacctttaccttggactcatcaagcacagcctcctggccaggaactcactcagctacaactcagagatttccacagtcagtggtgacaactcctatgagc

SEQ ID NO: 5859 - DNA, 201 bp, Homo sapiens
catccccactcaaacaggtccttctgggtctacctcacaggatacccttaccttggacacatccaccacaaagtcccaggcaaagactcattcaactttgrctcagagatttccacactcagagatgaccactctcatgagcagaggtcctggagatatgtcatggcaaagctctccctctctggaaaatcccagctctct

SEQ ID NO: 5860 - DNA, 201 bp, Homo sapiens
acagaagtcacctcctctggtagaacatccatccctggcccttctcagtccacagttttgccagaaatatccacaagaacaatgacaaggctctttgcctygcccaccatgacagaatcagcagaaatgaccatccccactcaaacaggtccttctgggtctacctcacaggatacccttaccttggacacatccaccaca

SEQ ID NO: 5861 - DNA, 201 bp, Homo sapiens
ggtcagatcagacatctgggagtgacatcacccttggtgcatctcctgatgtcacaaacacattatacatcacctccacagcacaaaccacctcactagtrtctctgccctctggagaccaaggcattacaagcctcaccaatccctcaggaggaaaaacaagctctgcgtcatctgtcacatctccttcaatagggcttg

SEQ ID NO: 5862 - DNA, 201 bp, Homo sapiens
agactagcacctctgaagagaccacctcaatcacagaaacaagtgcagtcctttttggagtgcccactagtgctactactgaagtctccatgacagaaatmatgtcctctaatagaacacacatccctgactctgatcagtccacgatgtctccagacatcatcactgaagtgatcaccaggctctcttcctcatccatga

SEQ ID NO: 5863 - DNA, 201 bp, Homo sapiens
cccatataaagccacatccgcagtagttatcacttccacctcgggggactcaatagtttccacatcaatgcctagatcctctgcgatgaaaaagattgagyctgagacaactttctccctgatatttagactgagggagactagcacctcccagaaaattggctcatcctcagacacaagcacggtctttgacaaagcatt

SEQ ID NO: 5864 - DNA, 201 bp, Homo sapiens
ctggtgctactactaaggtctccagaacagaagccctctccttaggcagaacatccaccccaggtcctgctcaatccacaatatcaccagaaatctccacrgaaaccatcactagaatttctactcccctcaccacgacaggatcagcagaaatgaccatcacccccaaaacaggtcattctggggcatcctcacaaggta

SEQ ID NO: 5865 - DNA, 201 bp, Homo sapiens
aacaggttattctctggctacatcccaggttacccttcccttgggcacctcaatgacctttttgtcagggacccactcaactatgtctcaaggactttcayactcagagatgaccaatcttatgagcaggggtcctgaaagtctgtcatggacgagccctcgctttgtggaaacaactagatcttcctcttctctgacatc

SEQ ID NO: 5866 - DNA, 201 bp, Homo sapiens
gactcctggattcagggagactagcacctctgaagagaccacctcaatcacagaaacaagtgcagtcctttttggagtgcccactagtgctactactgaartctccatgacagaaatcatgtcctctaatagaacacacatccctgactctgatcagtccacgatgtctccagacatcatcactgaagtgatcaccaggct

SEQ ID NO: 5867 - DNA, 201 bp, Homo sapiens
agttatcacttccagcagaacaaccatctcagggcctgatcattccaaaatgtcaccctacatctccacagaaaccatcaccaggctctccacttttcctkttgtaacaggatccacagaaatggccatcaccaaccaaacaggtcctatagggactatctcacaggctacccttaccctggacacatcaagcacagcttc

SEQ ID NO: 5868 - DNA, 201 bp, Homo sapiens
agaaaccatcaccaggctctccacttttccttttgtaacaggatccacagaaatggccatcaccaaccaaacaggtcctatagggactatctcacaggctrcccttaccctggacacatcaagcacagcttcctgggaagggactcactcacctgtgactcagagatttccacactcagaggagaccactactatgagcag

SEQ ID NO: 5869 - DNA, 201 bp, Homo sapiens
tttgtaacaggatccacagaaatggccatcaccaaccaaacaggtcctatagggactatctcacaggctacccttaccctggacacatcaagcacagcttyctgggaagggactcactcacctgtgactcagagatttccacactcagaggagaccactactatgagcagaagtactaagggcgtgtcatggcaaagccct

SEQ ID NO: 5870 - DNA, 201 bp, Homo sapiens
ccaggacagaagtcacctcctctagcagaacatccatctctggttctgctgagtccacaatgttgccagaaatatccaccacaagaaaaatcattaagttycctacttcccccatcctggcagaatcatcagaaatgaccatcaagacccaaacaagtcctcctgggtctacatcagagagtacctttacattagacacat

SEQ ID NO: 5871 - DNA, 201 bp, Homo sapiens
cagagagtacctttacattagacacatcaaccactccctccttggtaataacccattcgactatgactcagagattgccacactcagagataaccactctkgtgagtagaggtgctggggatgtgccacggcccagctctctccctgtggaagaaacaagccctccatcttcccagctgtctttatctgccatgatctcac

SEQ ID NO: 5872 - DNA, 201 bp, Homo sapiens
tgacacaccttcagatggggctgagagtattcccactgtctccttttccccctcccctgatactgaagtgacaactatctcacatttcccagaaaagacarctcattcatttagaaccatttcatctctcactcatgagttgacttcaagagtgacacctattcctggggattggatgagttcagctatgtctacaaagcc

SEQ ID NO: 5873 - DNA, 201 bp, Homo sapiens
ctctgagcacatcttccaatatccttgaagaccctgtaaccagcccaaactctgtgagctcattgacagataaatccaaacataaaaccgagacatgggtmagcaccacagccattccctccactgtcctgaataataagataatggcagctgaacaacagacaagtcgatctgtggatgaggcttattcatcaactagtt

SEQ ID NO: 5874 - DNA, 201 bp, Homo sapiens
accaggcagtcactggccacaatgtcctctgtctccctagagtcaccaactgctagaagcatcacagggactggtcagcaaagcagtccagaactggtttyaaagacaactggaatggaattctctatgtggcatggctctactggagggaccacaggggacacacatgtctctctgagcacatcttccaatatccttgaa

SEQ ID NO: 5875 - DNA, 201 bp, Homo sapiens
agtgcctctataacaactgataagccccaaactgtgacctcctggaacacagaaacctcaccatctgtaacttcagttggacccccagaattttccaggaytgtcacaggcaccactatgaccttgataccatcagagatgccaacaccacctaaaaccagtcatggagaaggagtgagtccaaccactatcttgagaact

SEQ ID NO: 5876 - DNA, 201 bp, Homo sapiens
ggccaacgtggggacctccatttctggacatgaatcacaatcttctgtcccagctgattcagacacatccaaagccacatctccaatgggtaccaccttcrccatgggggatacaagtgtttctacatcaactcctgccttctttgagactagaattcagactgaatcaacatcctctttgattcctggattaagggacac

SEQ ID NO: 5877 - DNA, 201 bp, Homo sapiens
catggaacctgtgaccaattcacctcaaaatttgaacaatccatcaaatgagatactggccactttggcagccaccacagatatagagactattcatcctyccataaacaaagcagtgaccaatatggggactgccagttcagcacatgtactgcattccactctcccagtcagctcagaaccatctacagccacatctcc

SEQ ID NO: 5878 - DNA, 201 bp, Homo sapiens
actgcagtggccaacgtggggacctccatttctggacatgaatcacaatcttctgtcccagctgattcagacacatccaaagccacatctccaatgggtaycaccttcgccatgggggatacaagtgtttctacatcaactcctgccttctttgagactagaattcagactgaatcaacatcctctttgattcctggatta

SEQ ID NO: 5879 - DNA, 201 bp, Homo sapiens
agcccacaggagccagtccctccattacactgggagagagaaggacaatcacctctgctgctccaaccacttcccccatagttctcactgctagtttcacrgagaccagcacagtttcactggataatgaaactacagtaaaaacctcagatatccttgacgcacggaaaacaaatgagctcccctcagatagcagttctt

SEQ ID NO: 5880 - DNA, 201 bp, Homo sapiens
ttcttacttctgttctggtgacaaccacaaatgtattgggcacaacaagcccagagaccgtaacgagttcacctccaaatttaagcagccccacacaggaragactgaccacttacaaagacactgcgcacacagaagccatgcatgcttccatgcatacaaacactgcagtggccaacgtggggacctccatttctggac

SEQ ID NO: 5881 - DNA, 201 bp, Homo sapiens
gacaaatactgccttttcttatgtgcccacaggtgctattactcaggcctccagaacagaaatctcctctagcagaacatccatctcagaccttgatcggyccacaatagcacccgacatctccacaggaatgatcaccaggctcttcacctcccccatcatgacaaaatctgcagaaatgaccgtcaccactcaaacaac

SEQ ID NO: 5882 - DNA, 201 bp, Homo sapiens
agagaagaccactctctttagcaaaggtcctgaggatacatcacagccaagccctccctctgtggaagaaaccagctcttcctcttccctggtacctatcmatgctacaacctcgccttccaatattttgttgacatcacaagggcacagtccctcctctactccacctgtgacctcagttttcttgtctgagacctctgg

SEQ ID NO: 5883 - DNA, 201 bp, Homo sapiens
aatgaagcagcacacagaggtaccataagaccagtcaaaggccctcagacatccacttcgcctgccagtcctaaaggactacacacaggagggacaaaaaraatggagaccaccaccacagctctgaagaccaccaccacagctctgaagaccacttccagagccaccttgaccaccagtgtctatactcccactttggga

SEQ ID NO: 5884 - DNA, 201 bp, Homo sapiens
agagtctacaagggctagaacagagcctaattccttcttgactattgaactgagggacgtcagcccttacatggacaccagctcaaccacacaaacaagtwttatctcttccccaggttccactgcgatcaccaaggggcctagaacagaaattacctcctctaagagaatatccagctcattccttgcccagtctatgag

SEQ ID NO: 5885 - DNA, 201 bp, Homo sapiens
gccacatccgcagtagttatcacttccacctcgggggactcaatagtttccacatcaatgcctagatcctctgcgatgaaaaagattgagtctgagacaaytttctccctgatatttagactgagggagactagcacctcccagaaaattggctcatcctcagacacaagcacggtctttgacaaagcattcactgctgct

SEQ ID NO: 5886 - DNA, 201 bp, Homo sapiens
agagttccaagactgatttcacctcttctgcaaaaacatcatccccagactggcctccagcctcacagtatactgaaattccagtggacataatcaccccstttaatgcttctccatctattacggagtccactgggataacctccttcccagaatccaggtttactatgtctgtaacagaaagtactcatcatctgagta

SEQ ID NO: 5887 - DNA, 201 bp, Homo sapiens
ccccaagttggaaaagcagcccatatgagagaattgccccttctgagtccaccacagacaaagaggcaattcacccttctacaaacacagtagagaccacwggctgggtcacaagttccgaacatgcttctcattccactatcccagcccactcagcgtcatccaaactcacatctccagtggttacaacctccaccaggg

SEQ ID NO: 5888 - DNA, 201 bp, Homo sapiens
taaggaccctgaatacgctggacataaacttggaatctgggacgacttcatccccaagttggaaaagcagcccatatgagagaattgccccttctgagtcyaccacagacaaagaggcaattcacccttctacaaacacagtagagaccacaggctgggtcacaagttccgaacatgcttctcattccactatcccagccc

SEQ ID NO: 5889 - DNA, 201 bp, Homo sapiens
gcaaggagctctggagttactttttcaagaccagatcccacaagcaaaaaggcagagcagacttccactcagcttcccaccaccacttctgcacatccagrgcaggtgcccagatcagcagcaacaactctggatgtgatcccacacacagcaaaaactccagatgcaacttttcagagacaagggcagacagctcttaca

SEQ ID NO: 5890 - DNA, 201 bp, Homo sapiens
agccaactgaccaatggcatcaaagagctgggcccctacaccctggacaggaacagtctctatgtcaatggtttcacccatcggacctctgtgcccaccascagcactcctgggacctccacagtggaccttggaacctcagggactccattctccctcccaagccccgcaactgctggccctctcctggtgctgttcacc

SEQ ID NO: 5891 - DNA, 201 bp, Homo sapiens
ttctgtttgattctctgtccactcttgactgggacactgggagatctctgtcatcagccacagccactacctcagctcctcagggggccacaactccccargaactcactttggaaaccatgatcagcccagctacctcacagttgcccttctctatagggcacattacaagtgcagtcacaccagctgcaatggcaagga

SEQ ID NO: 5892 - DNA, 201 bp, Homo sapiens
acaccacagagagggtcctgcagggtctgcttggtcccatattcaagaacaccagtgttggccctctgtactctggctgcagactgacctctctcaggtcygagaaggatggagcagccactggagtggatgccatctgcatccatcatcttgaccccaaaagccctggactcaacagagagcggctgtactgggagctga

SEQ ID NO: 5893 - DNA, 201 bp, Homo sapiens
accaccatcaccaccatgggaaccaactcaatctcaactaccacacccaacccagaagtgggtatgagtaccatggacagcaccccggccacagagaggcrcacaacttctacagaacacccttccacctggtcttccacagctgcatcagattcctggactgtcacagacatgacttcaaacttgaaagttgcaagatct

SEQ ID NO: 5894 - DNA, 201 bp, Homo sapiens; identical to SEQ ID NO: 2607

SEQ ID NO: 5895 - DNA, 201 bp, Homo sapiens
taccttggacacaccaactacatcctccagggcaggaacacactcgatggcgactcaggaatttccacactcagaaatgaccactgtcatgaacaaggacyctgagattctatcatggacaatccctccttctatagagaaaaccagcttctcctcttccctgatgccttcaccagccatgacttcacctcctgtttcctc

SEQ ID NO: 5896 - DNA, 201 bp, Homo sapiens
attttaagtacaagttggactcccagtagtacagaagcagaagatgtgcctgtttcaatggtttctacagatcatgctagtacaaagactgacccaaataygcccctgtccacttttctgtttgattctctgtccactcttgactgggacactgggagatctctgtcatcagccacagccactacctcagctcctcagggg

SEQ ID NO: 5897 - DNA, 201 bp, Homo sapiens
gactctgagggccaatgtaagtgcagtgaaaagtgacattgcccctactgctgggcatctatctcagacttcatctcctgcggaagtgagcatcctggacrtaaccacagctcctactccaggtatctccaccaccatcaccaccatgggaaccaactcaatctcaactaccacacccaacccagaagtgggtatgagtac

SEQ ID NO: 5898 - DNA, 201 bp, Homo sapiens
agcctcaccaatccctcaggaggaaaaacaagctctgcgtcatctgtcacatctccttcaatagggcttgagactctgagggccaatgtaagtgcagtgamaagtgacattgcccctactgctgggcatctatctcagacttcatctcctgcggaagtgagcatcctggacgtaaccacagctcctactccaggtatctcc

SEQ ID NO: 5899 - DNA, 201 bp, Homo sapiens
tagccaccagtcctggggcagaaaccagttcagctattccaattatgactgtctcacctggtgcagaagatctggtgacctcacaggtcactagttctggsacagacagaaatatgactattccaactttgactctttctcctggtgaaccaaagaccatagcctcattagtcacccatcctgaagcacagacaagttcgg

SEQ ID NO: 5900 - DNA, 201 bp, Homo sapiens
tctggagaccaaggcattacaagcctcaccaatccctcaggaggaaaaacaagctctgcgtcatctgtcacatctccttcaatagggcttgagactctgakggccaatgtaagtgcagtgaaaagtgacattgcccctactgctgggcatctatctcagacttcatctcctgcggaagtgagcatcctggacgtaaccaca

SEQ ID NO: 5901 - DNA, 201 bp, Homo sapiens
gcctgccccagcagaggagacggggaccagtccagcaggcacatccccaggaagcccagaaatgtctaccactctcaaaatcatgagctccaaggaacccrgcatcagcccagagatcaggtccactgtgagaaattctccttggaagactccagaaacaactgttcccatggagaccacagtggaaccagtcacccttca

SEQ ID NO: 5902 - DNA, 201 bp, Homo sapiens
tccctgagccctaaattgagggagacaggcagttctgtggagacaagctcagccatagagacaagtgctgtcctttctgaagtgtccattggtgctactastgagatctccaggacagaagtcacctcctctagcagaacatccatctctggttctgctgagtccacaatgttgccagaaatatccaccacaagaaaaatc

SEQ ID NO: 5903 - DNA, 201 bp, Homo sapiens
gggatacaagtgttctcacatcaactcctgccttccttgagactaggaggattcagacagagctagcttcctccctgacccctggattgagggagtccagyggctctgaagggaccagctcaggcaccaagatgagcactgtcctctctaaagtgcccactggtgctactactgagatctccaaggaagacgtcacctcca

SEQ ID NO: 5904 - DNA, 201 bp, Homo sapiens
gggacagaaaccagcacaatgattccaacttcaactctttcccttggtttactagagactacaggcttactggccaccagctcttcagcagagaccagcasgagtactctaactctgactgtttcccctgctgtctctgggctttccagtgcctctataacaactgataagccccaaactgtgacctcctggaacacagaa

SEQ ID NO: 5905 - DNA, 201 bp, Homo sapiens
gtggtgacctctctggtcactagttctagggcagtgactagtacaactattccaattctgactttttctcttggtgaaccagagaccacaccttcaatggscaccagtcatgggacagaagctggctcagctgttccaactgttttacctgaggtaccaggaatggtgacctctctggttgctagttctagggcagtaacc

SEQ ID NO: 5906 - DNA, 201 bp, Homo sapiens
agacaccacaatttccagatcaatacctaaatcctctaagactacaagaactgagactgagacaacttcctccctgactcctaaactgagggagaccagcrtctcccaggagatcacctcgtccacagagacaagcactgttccttacaaagagctcactggtgccactaccgaggtatccaggacagatgtcacttcctc

SEQ ID NO: 5907 - DNA, 201 bp, Homo sapiens
cacttcagctcccaatatgaatatcacctcagatgagagtctggccgcttctaaagccaccacggagacagaggcaattcacgtttttgaaaatacagcarcgtcccatgtggaaaccaccagtgctacagaggaactctattcctcttccccaggcttctcagagccaacaaaagtgatatctccagtggtcacctcttc

SEQ ID NO: 5908 - DNA, 201 bp, Homo sapiens
gtgacctcacaggtcactagttctggcacagacagaaatatgactattccaactttgactctttctcctggtgaaccaaagaccatagcctcattagtcayccatcctgaagcacagacaagttcggccattccaacttcaactatctcgcctgctgtatcacggttggtgacctcaatggtcaccagtttggcggcaaag

SEQ ID NO: 5909 - DNA, 201 bp, Homo sapiens
tcacctccacagcacaaaccacctcactagtgtctctgccctctggagaccaaggcattacaagcctcaccaatccctcaggaggaaaaacaagctctgcrtcatctgtcacatctccttcaatagggcttgagactctgagggccaatgtaagtgcagtgaaaagtgacattgcccctactgctgggcatctatctcaga

SEQ ID NO: 5910 - DNA, 201 bp, Homo sapiens
agtgtgcccactggtgctactactgaggtctccaggacagaagccatctcttctagcagaacatccatcccaggccctgctcaatccacaatgtcatcagrcacctccatggaaaccatcactagaatttctacccccctcacaaggaaagaatcaacagacatggccatcacccccaaaacaggtccttctggggctacc

SEQ ID NO: 5911 - DNA, 201 bp, Homo sapiens
agaagccatgcatgcttccatgcatacaaacactgcagtggccaacgtggggacctccatttctggacatgaatcacaatcttctgtcccagctgattcasacacatccaaagccacatctccaatgggtaccaccttcgccatgggggatacaagtgtttctacatcaactcctgccttctttgagactagaattcagac

SEQ ID NO: 5912 - DNA, 201 bp, Homo sapiens
agagtcaatttcctccctgagccctaaattgagggagacaggcagttctgtggagacaagctcagccatagagacaagtgctgtcctttctgaagtgtccrttggtgctactactgagatctccaggacagaagtcacctcctctagcagaacatccatctctggttctgctgagtccacaatgttgccagaaatatccac

SEQ ID NO: 5913 - DNA, 201 bp, Homo sapiens
agcagaaaccagcacagctcttcccaggacaaccccatctgttttcaatagagaatcagagaccacagcctcactggtctctcgttctggggcagagagawgtccggttattcaaactctagatgtttcttctagtgagccagatacaacagcttcatgggttatccatcctgcagagaccatcccaactgtttccaagac

SEQ ID NO: 5914 - DNA, 201 bp, Homo sapiens
caccaaggggcctagaacagaaattacctcctctaagagaatatccagctcattccttgcccagtctatgaggtcgtcagacagcccctcagaagccatcwccaggctgtctaactttcctgccatgacagaatctggaggaatgatccttgctatgcaaacaagtccacctggcgctacatcactaagtgcacctacttt

SEQ ID NO: 5915 - DNA, 201 bp, Homo sapiens
atgagaaagaaaaatcaaccccaagtgcaccttggatcactgagatgatgaattctgtctcagaagataccatcaaggaggttaccagctcctccagtgtrttaaggaccctgaatacgctggacataaacttggaatctgggacgacttcatccccaagttggaaaagcagcccatatgagagaattgccccttctgagt

SEQ ID NO: 5916 - DNA, 201 bp, Homo sapiens
tggacacttcaacaacttttatgtcagggacccattcaactgcatctcaaggattttcacactcacagatgaccgctcttatgagtagaactcctggagakgtgccatggctaagccatccctctgtggaagaagccagctctgcctctttctcactgtcttcacctgtcatgacctcatcttctcccgtttcttccacat

SEQ ID NO: 5917 - DNA, 201 bp, Homo sapiens
gggatacaagtgtttctacatcaactcctgccttctttgagactagaattcagactgaatcaacatcctctttgattcctggattaagggacaccaggacstctgaggagatcaacactgtgacagagaccagcactgtcctttcagaagtgcccactactactactactgaggtctccaggacagaagttatcacttcca

SEQ ID NO: 5918 - DNA, 201 bp, Homo sapiens
acttctaccaacacatttacagatgtgagcaccaacccctccacctctctgataatgacagaatcttcaggagtgaccatcaccacccaaacaggtcctaytggagctgcaacacagggtccatatctcttggacacatcaaccatgccttacttgacagagactccattagctgtgactccagattttatgcaatcagag

SEQ ID NO: 5919 - DNA, 201 bp, Homo sapiens
acaggagagactgaccacttacaaagacactgcgcacacagaagccatgcatgcttccatgcatacaaacactgcagtggccaacgtggggacctccattkctggacatgaatcacaatcttctgtcccagctgattcagacacatccaaagccacatctccaatgggtaccaccttcgccatgggggatacaagtgtttc

SEQ ID NO: 5920 - DNA, 201 bp, Homo sapiens
acaattggatgtgaccactcttatgagcagaattccacaggatgtatcatggacaagtcctccctctgtggataaaaccagctccccctcttcctttctgycctcacctgcaatgaccacaccttccctgatttcttctaccttaccagaggataagctctcctctcctatgacttcacttctcacctctggcctagtgaa

SEQ ID NO: 5921 - DNA, 201 bp, Homo sapiens
cagggtctgctcaaacccttgttcaggaatagcagtctggaatacctctattcaggctgcagactagcctcactcaggccagagaaggatagctcagccayggcagtggatgccatctgcacacatcgccctgaccctgaagacctcggactggacagagagcgactgtactgggagctgagcaatctgacaaatggcatc

SEQ ID NO: 5922 - DNA, 201 bp, Homo sapiens
tctatcatggacaatccctccttctatagagaaaaccagcttctcctcttccctgatgccttcaccagccatgacttcacctcctgtttcctcaacattaycaaagaccattcacaccactccttctcctatgacctcactgctcacccctagcctagtgatgaccacagacacattgggcacaagcccagaacctacaac

SEQ ID NO: 5923 - DNA, 201 bp, Homo sapiens
tgaggtaccaggaatggtgacctttctggtcactagttctagagcagtaaccagtacaactattccaactctgactatttcttctgatgaaccagagaccrcaacttcattggtcacccattctgaggcaaagatgatttcagccattccaactttagctgtctcccctactgtacaagggctggtgacttcactggtcac

SEQ ID NO: 5924 - DNA, 201 bp, Homo sapiens
gactaagtccccacatgaaacagagacaagaaccacatggctcactcatcctgcagagaccagctcaactattcccagaacaatccccaatttttctcatmatgaatcagatgccacaccttcaatagccaccagtcctggggcagaaaccagttcagctattccaattatgactgtctcacctggtgcagaagatctggt

SEQ ID NO: 5925 - DNA, 201 bp, Homo sapiens
acccttcccttgggcacctcaatgacctttttgtcagggacccactcaactatgtctcaaggactttcacactcagagatgaccaatcttatgagcagggrtcctgaaagtctgtcatggacgagccctcgctttgtggaaacaactagatcttcctcttctctgacatcattacctctcacgacctcactttctcctgtg

SEQ ID NO: 5926 - DNA, 201 bp, Homo sapiens
acattgtttctacaaccatacctgcttcctctgagataacaagaattgagatggagtcaacatccaccctgacccccacaccaagggagaccagcacctcycaggagatccactcagccacaaagccaagcactgttccttacaaggcactcactagtgccacgattgaggactccatgacacaagtcatgtcctctagca

SEQ ID NO: 5927 - DNA, 201 bp, Homo sapiens
ctttactcccggacactccagccatccctctcactgccactgagccaacaagttcattagctacatcctttgattccaccccactggtgactatagcttcrgatagtcttggcacagtcccagagactaccctgaccatgtcagagacctcaaatggtgatgcactggttcttaagacagtaagtaacccagataggagca

SEQ ID NO: 5928 - DNA, 201 bp, Homo sapiens
atcaccagagagcatcccctcctctcctctccctgtgactgcacttcttacttctgttctggtgacaaccacaaatgtattgggcacaacaagcccagagmccgtaacgagttcacctccaaatttaagcagccccacacaggagagactgaccacttacaaagacactgcgcacacagaagccatgcatgcttccatgca

SEQ ID NO: 5929 - DNA, 201 bp, Homo sapiens
ctcccctgatactgaagtgacaactatctcacatttcccagaaaagacaactcattcatttagaaccatttcatctctcactcatgagttgacttcaagaktgacacctattcctggggattggatgagttcagctatgtctacaaagcccacaggagccagtccctccattacactgggagagagaaggacaatcacctc

SEQ ID NO: 5930 - DNA, 201 bp, Homo sapiens
ttccatggaagcaacttctatcagggaaccatcaacaaccatcctcacaacagagaccacgaatggcccaggctctatggctgtggcttctaccaacatcycaattggaaagggctacattactgaaggaagattggacacaagccatctgcccattggaaccacagcttcctctgagacatctatggattttaccatggc

SEQ ID NO: 5931 - DNA, 201 bp, Homo sapiens
gggaccaatgtggcaaccaccagctctggatataaatcacagtcctctgtcctagctgactcatctccaatgtgtaccacctccaccatgggggatacaartgttctcacatcaactcctgccttccttgagactaggaggattcagacagagctagcttcctccctgacccctggattgagggagtccagtggctctgaa

SEQ ID NO: 5932 - DNA, 201 bp, Homo sapiens
tatccaaggagtaacagaaagtccactccatccttcttccacttccccctctaagattgttgctccacggaatacaacctatgaaggttcgatcacagtgrcactttctactttgcctgcgggaactactggttcccttgtattcagtcagagttctgaaaactcagagacaacggctttggtagactcatcagctgggct

SEQ ID NO: 5933 - DNA, 201 bp, Homo sapiens
atcagaagtgggtccactcactcaactggaaccaaaacattttcttctctccctctgaccatgaacccaggtgaggttacagccatgtctgaaatcaccaygaacagactgacagctactcaatcaacagcacccaaagggatacctgtgaagcccaccagtgctgagtcaggcctcctaacacctgtctctgcctcctca

SEQ ID NO: 5934 - DNA, 201 bp, Homo sapiens
gcccgagaaagatggggcagccactggagtggatgccatctgcacccaccgccttgaccccaaaagccctggactcaacagggagcagctgtactgggagytaagcaaactgaccaatgacattgaagagctgggcccctacaccctggacaggaacagtctctatgtcaatggtttcacccatcagagctctgtgtccac

SEQ ID NO: 5935 - DNA, 201 bp, Homo sapiens
ctactgaaggacgcttggttatggtcagtactttggacacttcaagccaaccaggcaggacatcttcatcacccattttggataccagaatgacagagagygttgagctgggaacagtgacaagtgcttatcaagttccttcactctcaacacggttgacaagaactgatggcattatggaacacatcacaaaaataccca

SEQ ID NO: 5936 - DNA, 201 bp, Homo sapiens
ctcttatgagcagaattccacaggatgtatcatggacaagtcctccctctgtggataaaaccagctccccctcttcctttctgtcctcacctgcaatgacmacaccttccctgatttcttctaccttaccagaggataagctctcctctcctatgacttcacttctcacctctggcctagtgaagattacagacatattac

SEQ ID NO: 5937 - DNA, 201 bp, Homo sapiens
gactcagagacacccaaagccacaactcaaatggttatcaccaccactgtgggagatccagctccttccacatcaatgccagtgcatggttcctctgagaytacaaacattaagagagagccaacatatttcttgactcctagactgagagagaccagtacctctcaggagtccagctttcccacggacacaagttttcta

SEQ ID NO: 5938 - DNA, 201 bp, Homo sapiens; identical to SEQ ID NO: 2605

SEQ ID NO: 5939 - DNA, 201 bp, Homo sapiens
tcacaccactccttctcctatgacctcactgctcacccctagcctagtgatgaccacagacacattgggcacaagcccagaacctacaaccagttcacctmcaaatttgagcagtacctcacatgagatactgacaacagatgaagacaccacagctatagaagccatgcatccttccacaagcacagcagcgactaatgt

SEQ ID NO: 5940 - DNA, 201 bp, Homo sapiens
gttgaaacaactgatggaacgctagtgaccaccataaagatgtcaagccaggcagcacaaggaaattccacgtggcctgccccagcagaggagacggggascagtccagcaggcacatccccaggaagcccagaaatgtctaccactctcaaaatcatgagctccaaggaacccagcatcagcccagagatcaggtccact

SEQ ID NO: 5941 - DNA, 201 bp, Homo sapiens
agaaaacacagctgtgactcagatgggcaccatcagtgctagacaagaattctattcctcttatccaggcctcccagagccatccaaagtgacatctccartggtcacctcttccaccataaaagacattgtttctacaaccatacctgcttcctctgagataacaagaattgagatggagtcaacatccaccctgacccc

SEQ ID NO: 5942 - DNA, 201 bp, Homo sapiens
agagaccactttgacttccactcctggaaacagggccataagcttaacattgcctttttcatccattccagtggaagaagtcatttctacaggcataaccycaggaccagacatcaactcagcacccatgacacattctcccatcaccccaccaacaattgtatggaccagtacaggcacaattgaacagtccactcaacc

SEQ ID NO: 5943 - DNA, 201 bp, Homo sapiens
atgggcataagcagagaacctggaaccagttccacttcaaatttgagcagcacctcccatgagagactgaccactttggaagacactgtagatacagaagmcatgcagccttccacacacacagcagtgaccaacgtgaggacctccatttctggacatgaatcacaatcttctgtcctatctgactcagagacacccaaa

SEQ ID NO: 5944 - DNA, 201 bp, Homo sapiens
tgtttcaatccactcggagccatccaaggctacatacccagtgggtactccctcttccatggctgaaacctctatttccacatcaatgcctgctaattttsagaccacaggatttgaggctgagccattttctcatttgacttctggatttaggaagaccaacatgtccctggacaccagctcagtcacaccaacaaatac

SEQ ID NO: 5945 - DNA, 201 bp, Homo sapiens
catcagtggaaaaaactagccctccatcttccctggtgtctttatctgcagtaacctcaccttcgccactttattccacaccatctgagagtagccactcrtctcctctccgggtgacttctcttttcacccctgtcatgatgaagaccacagacatgttggacacaagcttggaacctgtgaccacttcacctcccagta

SEQ ID NO: 5946 - DNA, 201 bp, Homo sapiens
gagaccacctcaatcacagaaacaagtgcagtcctttttggagtgcccactagtgctactactgaagtctccatgacagaaatcatgtcctctaatagaayacacatccctgactctgatcagtccacgatgtctccagacatcatcactgaagtgatcaccaggctctcttcctcatccatgatgtcagaatcaacacaa

SEQ ID NO: 5947 - DNA, 201 bp, Homo sapiens
gacagagaccagcactgtcctttcagaagtgcccactactactactactgaggtctccaggacagaagttatcacttccagcagaacaaccatctcagggyctgatcattccaaaatgtcaccctacatctccacagaaaccatcaccaggctctccacttttccttttgtaacaggatccacagaaatggccatcaccaa

SEQ ID NO: 5948 - DNA, 201 bp, Homo sapiens
aatctacagaaatgaccattaccacccaaacaggttctcctggggctacatcaaggggtacccttaccttggacacttcaacaacttttatgtcagggacscattcaactgcatctcaaggattttcacactcacagatgaccgctcttatgagtagaactcctggagaggtgccatggctaagccatccctctgtggaag

SEQ ID NO: 5949 - DNA, 201 bp, Homo sapiens
atccaaggcactgaaaagcccacaatgtcaccggacacctccacaagatctgtcaccatgctttctacttttgctggcctgacaaaatccgaagaaaggaycattgccacccaaacaggtcctcatagggcgacatcacagggtacccttacctgggacacatcaatcacaacctcacaggcagggacccactcagctatg

SEQ ID NO: 5950 - DNA, 201 bp, Homo sapiens
aggattccgacagagccaacattctcattgactcctggattcagggagactagcacctctgaagagaccacctcaatcacagaaacaagtgcagtcctttwtggagtgcccactagtgctactactgaagtctccatgacagaaatcatgtcctctaatagaacacacatccctgactctgatcagtccacgatgtctcca

SEQ ID NO: 5951 - DNA, 201 bp, Homo sapiens
attgaatactggtgtcactagagcctccagattggaaaacggctctgatacctcttctaagtccctgtctatgggaaacagcactcacacttccatgactkacacagagaagagtgaagtgtcttcttcaatccatccccgacctgagacctcagctcctggagcagagaccactttgacttccactcctggaaacagggc

SEQ ID NO: 5952 - DNA, 201 bp, Homo sapiens
cagccccactttccacccatccagggacagaaaccagcacaatgattccaacttcaactctttcccttggtttactagagactacaggcttactggccacmagctcttcagcagagaccagcacgagtactctaactctgactgtttcccctgctgtctctgggctttccagtgcctctataacaactgataagccccaaa

SEQ ID NO: 5953 - DNA, 201 bp, Homo sapiens
tttgggaagcactgaaaatacaggaaaagaaaaactcagaactgcctctatggatcttccatctccaactccatcaatggaggtgacaccatggatttctytcactctcagtaatgcccccaataccacagattcacttgacctcagccatggggtgcacaccagctctgcagggactttggccactgacaggtcattgaa

SEQ ID NO: 5954 - DNA, 201 bp, Homo sapiens
atcacagggcacatttaccttggacacaccaactacatcctccagggcaggaacacactcgatggcgactcaggaatttccacactcagaaatgaccactstcatgaacaaggaccctgagattctatcatggacaatccctccttctatagagaaaaccagcttctcctcttccctgatgccttcaccagccatgacttc

SEQ ID NO: 5955 - DNA, 201 bp, Homo sapiens
cccttggtggcaccagcacttcagcgctgacaaccacatctccatctaccactttagtctcagaggagaccaacacccatcactccacgagtggaaaggaracagaaggaactttgaatacatctatgactccacttgagacctctgctcctggagaagagtccgaaatgactgccaccttggtccccactctaggtttta

SEQ ID NO: 5956 - DNA, 201 bp, Homo sapiens
ggccaccagctcttcagcagagaccagcacgagtactctaactctgactgtttcccctgctgtctctgggctttccagtgcctctataacaactgataagmcccaaactgtgacctcctggaacacagaaacctcaccatctgtaacttcagttggacccccagaattttccaggactgtcacaggcaccactatgacctt

SEQ ID NO: 5957 - DNA, 201 bp, Homo sapiens
tccctgctgtctctgcctgccacgacctcaccttctcctgtttcctctacattagtagaggatttcccttccgcttctcttcctgtgacttctcttctcamccctggcctggtgataaccacagacaggatgggcataagcagagaacctggaaccagttccacttcaaatttgagcagcacctcccatgagagactgacc

SEQ ID NO: 5958 - DNA, 201 bp, Homo sapiens
tggttctctacatcccctgtcatgacagaatcagcagaaataaccatgaacacccatacaagtcctttaggggccacaacacaaggcaccagtactttggmcacgtcaagcacaacctctttgacaatgacacactcaactatatctcaaggattttcacactcacagatgagcactcttatgaggaggggtcctgaggat

SEQ ID NO: 5959 - DNA, 201 bp, Homo sapiens
gttctgggacagacaccagtacaaccttcccaacattgagtgagaccccatatgaaccagagactacagccacgtggctcactcatcctgcagaaaccagmacaacggtttctgggacaattcccaacttttcccataggggatcagacactgcaccctcaatggtcaccagtcctggagtagacacgaggtcaggtgttc

SEQ ID NO: 5960 - DNA, 201 bp, Homo sapiens
catccttgttacctgtctcttctcccacagaacccacagccagaagaaagagttctccagaaacatgggcaagctctatttcagttcctgccaagacctcsttggttgaaacaactgatggaacgctagtgaccaccataaagatgtcaagccaggcagcacaaggaaattccacgtggcctgccccagcagaggagacgg

SEQ ID NO: 5961 - DNA, 201 bp, Homo sapiens
tgttggacacaagcttggaacctgtgaccacttcacctcccagtatgaatatcacctcagatgagagtctggccacttctaaagccaccatggagacagargcaattcagctttcagaaaacacagctgtgactcagatgggcaccatcagtgctagacaagaattctattcctcttatccaggcctcccagagccatcca

SEQ ID NO: 5962 - DNA, 201 bp, Homo sapiens
ctgactctttcttctggtgagccagagaccacaacctcatttatcacctattctgagacacacacaagttcagccattccaactctccctgtctcccctgrtgcatcaaagatgctgacctcactggtcatcagttctgggacagacagcactacaactttcccaacactgacggagaccccatatgaaccagagacaaca

SEQ ID NO: 5963 - DNA, 201 bp, Homo sapiens
ctagttctgggacagacaccagtataactattccaactctgactctttcttctggtgagccagagaccacaacctcatttatcacctattctgagacacayacaagttcagccattccaactctccctgtctcccctggtgcatcaaagatgctgacctcactggtcatcagttctgggacagacagcactacaactttcc

SEQ ID NO: 5964 - DNA, 201 bp, Homo sapiens
ctacagaaatgaccattaccacccaaacaggttctcctggggctacatcaaggggtacccttaccttggacacttcaacaacttttatgtcagggacccaytcaactgcatctcaaggattttcacactcacagatgaccgctcttatgagtagaactcctggagaggtgccatggctaagccatccctctgtggaagaag

SEQ ID NO: 5965 - DNA, 201 bp, Homo sapiens
ggtccttctggggctacctcgcagggtacctttaccttggactcatcaagcacagcctcctggccaggaactcactcagctacaactcagagatttccacrgtcagtggtgacaactcctatgagcagaggtcctgaggatgtgtcatggccaagcccgctgtctgtggaaaaaaacagccctccatcttccctggtatct

SEQ ID NO: 5966 - DNA, 201 bp, Homo sapiens
ctctggctacatcccaggttacccttcccttgggcacctcaatgacctttttgtcagggacccactcaactatgtctcaaggactttcacactcagagatraccaatcttatgagcaggggtcctgaaagtctgtcatggacgagccctcgctttgtggaaacaactagatcttcctcttctctgacatcattacctctca

SEQ ID NO: 5967 - DNA, 201 bp, Homo sapiens
ctcaatggtcaccagtttggcggcaaagacaagtacaactaatcgagctctgacaaactcccctggtgaaccagctacaacagtttcattggtcacgcatyctgcacagaccagcccaacagttccctggacaacttccatttttttccatagtaaatcagacaccacaccttcaatgaccaccagtcatggggcagaatc

SEQ ID NO: 5968 - DNA, 201 bp, Homo sapiens
ggctacatcaaggggtacccttaccttggacacttcaacaacttttatgtcagggacccattcaactgcatctcaaggattttcacactcacagatgaccrctcttatgagtagaactcctggagaggtgccatggctaagccatccctctgtggaagaagccagctctgcctctttctcactgtcttcacctgtcatgac

SEQ ID NO: 5969 - DNA, 201 bp, Homo sapiens
agcccagagtctgtaaccagttcacctccaaatttgagcagcatcactcatgagagaccggccacttacaaagacactgcacacacagaagccgccatgcmtcattccacaaacaccgcagtgaccaatgtagggacttccgggtctggacataaatcacaatcctctgtcctagctgactcagagacatcgaaagccaca

SEQ ID NO: 5970 - DNA, 201 bp, Homo sapiens
cagggggccacaactccccaggaactcactttggaaaccatgatcagcccagctacctcacagttgcccttctctatagggcacattacaagtgcagtcayaccagctgcaatggcaaggagctctggagttactttttcaagaccagatcccacaagcaaaaaggcagagcagacttccactcagcttcccaccaccact

SEQ ID NO: 5971 - DNA, 201 bp, Homo sapiens
tcaccagtcctgggccagaagccagttcagctgtttcaacgacaactatctcacctgatatgtcagatctggtgacctcactggtccctagttctgggacrgacaccagtacaaccttcccaacattgagtgagaccccatatgaaccagagactacagccacgtggctcactcatcctgcagaaaccagcacaacggttt

SEQ ID NO: 5972 - DNA, 201 bp, Homo sapiens
caacacaacaacagggagcagtagtagtggagtcaccctgggcatagcccaccttcccataggaacatcctccccagctgagacatccacaaacatggcaytggaaagaagaagttctacagccactgtctctatggctgggacaatgggactccttgttactagtgctccaggaagaagcatcagccagtcattaggaag

SEQ ID NO: 5973 - DNA, 201 bp, Homo sapiens
cagcacatcctctccatattcctcagcctcacttgaatccttggattccacaatcagtaggaggaatgcaatcacttcctggctatgggacctcactacayctctccccactacaacttggccaagtactagtttatctgaggcactgtcctcaggccattctggggtttcaaacccaagttcaactacgactgaatttcc

SEQ ID NO: 5974 - DNA, 201 bp, Homo sapiens
gtcctaaaatctcaagttcacccaatctcaccagtccggccacaaaagcatggaccatcacagacacaactgaacactccactcaattacattacacaaawttggcagaaaaatcatctggatttgagacacagtcagctccaggacctgtctctgtagtaatccctacctcccctaccattggaagcagcacattggaac

SEQ ID NO: 5975 - DNA, 201 bp, Homo sapiens
ttggctaccagcctgggagcagaaaccagcacagctcttcccaggacaaccccatctgttttcaatagagaatcagagaccacagcctcactggtctctcrttctggggcagagagaagtccggttattcaaactctagatgtttcttctagtgagccagatacaacagcttcatgggttatccatcctgcagagaccatc

SEQ ID NO: 5976 - DNA, 201 bp, Homo sapiens
aagaactttcagcaccatggtcagcactgacactgcctccggagaaaatcctacctctagcaattctgtggtgacttctgttccagcaccaggtacatggrccagtgtaggcagtactactgacttacctgccatgggctttctcaagacaagtcctgcaggagaggcacactcacttctagcgtcaactattgaaccagc

SEQ ID NO: 5977 - DNA, 201 bp, Homo sapiens
agagttctgaaaactcagagacaacggctttggtagactcatcagctgggcttgagagggcatctgtgatgccactaaccacaggaagccagggtatggcyagctctggaggaatcagaagtgggtccactcactcaactggaaccaaaacattttcttctctccctctgaccatgaacccaggtgaggttacagccatgt

SEQ ID NO: 5978 - DNA, 201 bp, Homo sapiens
ctggtgcagaagatctggtgacctcacaggtcactagttctggcacagacagaaatatgactattccaactttgactctttctcctggtgaaccaaagacsatagcctcattagtcacccatcctgaagcacagacaagttcggccattccaacttcaactatctcgcctgctgtatcacggttggtgacctcaatggtca

SEQ ID NO: 5979 - DNA, 201 bp, Homo sapiens
acctcacatgagatactgacaacagatgaagacaccacagctatagaagccatgcatccttccacaagcacagcagcgactaatgtggaaaccaccagttmtggacatgggtcacaatcctctgtcctagctgactcagaaaaaaccaaggccacagctccaatggataccacctccaccatggggcatacaactgtttcc

SEQ ID NO: 5980 - DNA, 201 bp, Homo sapiens
tcacctcagatgagagtctggccacttctaaagccaccatggagacagaggcaattcagctttcagaaaacacagctgtgactcagatgggcaccatcagygctagacaagaattctattcctcttatccaggcctcccagagccatccaaagtgacatctccagtggtcacctcttccaccataaaagacattgtttcta

SEQ ID NO: 5981 - DNA, 201 bp, Homo sapiens
ctgcctcctcaagcccatcaaaggcctttgcctcactgactacagctcccccaacttgggggatcccacagtctaccttgacatttgagttttctgaggtyccaagtttggatactaagtccgcttctttaccaactcctggacagtccctgaacaccattccagactcagatgcaagcacagcatcttcctcactgtcca

SEQ ID NO: 5982 - DNA, 201 bp, Homo sapiens
agccgcgagtactttgaacactgatgcatcctcggtcacaggtctttctgagactcctgtgggggcaagtatcagctctgaagtccctcttccaatggccrtaacttctagatcagatgtttctggccttacatctgagagtactgctaacccgagtttaggcacagcctcttcagcagggaccaaattaactaggacaat

SEQ ID NO: 5983 - DNA, 201 bp, Homo sapiens
cccctttggtcaccagttctagggcagtgatcagtacaactattccaattctgactctttctcctggtgaaccagagaccacaccttcaatggccaccagkcatggggaagaagccagttctgctattccaactccaactgtttcacctggggtaccaggagtggtgacctctctggtcactagttctagggcagtgacta

SEQ ID NO: 5984 - DNA, 201 bp, Homo sapiens
ggcctcctaacacctgtctctgcctcctcaagcccatcaaaggcctttgcctcactgactacagctcccccaacttgggggatcccacagtctaccttgayatttgagttttctgaggtcccaagtttggatactaagtccgcttctttaccaactcctggacagtccctgaacaccattccagactcagatgcaagcaca

SEQ ID NO: 5985 - DNA, 201 bp, Homo sapiens
cctacaaccagttcacctccaaatttgagcagtacctcacatgagatactgacaacagatgaagacaccacagctatagaagccatgcatccttccacaascacagcagcgactaatgtggaaaccaccagttctggacatgggtcacaatcctctgtcctagctgactcagaaaaaaccaaggccacagctccaatggat

SEQ ID NO: 5986 - DNA, 201 bp, Homo sapiens
atcctgcagagaccatcccaactgtttccaagacaacccccaattttttccacagtgaattagacactgtatcttccacagccaccagtcatggggcagaygtcagctcagccattccaacaaatatctcacctagtgaactagatgcactgaccccactggtcactatttcggggacagatactagtacaacattcccaa

SEQ ID NO: 5987 - DNA, 201 bp, Homo sapiens
gatacctgtgaagcccaccagtgctgagtcaggcctcctaacacctgtctctgcctcctcaagcccatcaaaggcctttgcctcactgactacagctcccycaacttgggggatcccacagtctaccttgacatttgagttttctgaggtcccaagtttggatactaagtccgcttctttaccaactcctggacagtccct

SEQ ID NO: 5988 - DNA, 201 bp, Homo sapiens
acagcctcctggccaggaactcactcagctacaactcagagatttccacagtcagtggtgacaactcctatgagcagaggtcctgaggatgtgtcatggcyaagcccgctgtctgtggaaaaaaacagccctccatcttccctggtatcttcatcttcagtaacctcaccttcgccactttattccacaccatctgggagt

SEQ ID NO: 5989 - DNA, 201 bp, Homo sapiens
cagggcaggaacacactcgatggcgactcaggaatttccacactcagaaatgaccactgtcatgaacaaggaccctgagattctatcatggacaatccctycttctatagagaaaaccagcttctcctcttccctgatgccttcaccagccatgacttcacctcctgtttcctcaacattaccaaagaccattcacaccac

SEQ ID NO: 5990 - DNA, 201 bp, Homo sapiens
accaccaccacagctctgaagaccaccaccacagctctgaagaccacttccagagccaccttgaccaccagtgtctatactcccactttgggaacactgamtcccctcaatgcatcaatgcaaatggccagcacaatccccacagaaatgatgatcacaaccccatatgttttccctgatgttccagaaacgacatcctca

SEQ ID NO: 5991 - DNA, 201 bp, Homo sapiens; identical to SEQ ID NO: 5827

SEQ ID NO: 5992 - DNA, 201 bp, Homo sapiens; identical to SEQ ID NO: 5828

SEQ ID NO: 5993 - DNA, 201 bp, Homo sapiens; identical to SEQ ID NO: 5829

SEQ ID NO: 5994 - DNA, 201 bp, Homo sapiens; identical to SEQ ID NO: 5830

SEQ ID NO: 5995 - DNA, 201 bp, Homo sapiens; identical to SEQ ID NO: 5831

SEQ ID NO: 5996 - DNA, 201 bp, Homo sapiens; identical to SEQ ID NO: 5832

SEQ ID NO: 5997 - DNA, 201 bp, Homo sapiens; identical to SEQ ID NO: 5833

SEQ ID NO: 5998 - DNA, 201 bp, Homo sapiens; identical to SEQ ID NO: 5834

SEQ ID NO: 5999 - DNA, 201 bp, Homo sapiens; identical to SEQ ID NO: 5835

SEQ ID NO: 6000 - DNA, 201 bp, Homo sapiens; identical to SEQ ID NO: 5836

SEQ ID NO: 6001 - DNA, 201 bp, Homo sapiens; identical to SEQ ID NO: 5837

SEQ ID NO: 6002 - DNA, 201 bp, Homo sapiens; identical to SEQ ID NO: 5838

SEQ ID NO: 6003 - DNA, 201 bp, Homo sapiens; identical to SEQ ID NO: 5839

SEQ ID NO: 6004 - DNA, 201 bp, Homo sapiens; identical to SEQ ID NO: 5840

SEQ ID NO: 6005 - DNA, 201 bp, Homo sapiens; identical to SEQ ID NO: 5841

SEQ ID NO: 6006 - DNA, 201 bp, Homo sapiens; identical to SEQ ID NO: 5842

SEQ ID NO: 6007 - DNA, 201 bp, Homo sapiens; identical to SEQ ID NO: 5843

SEQ ID NO: 6008 - DNA, 201 bp, Homo sapiens; identical to SEQ ID NO: 5844

SEQ ID NO: 6009 - DNA, 201 bp, Homo sapiens; identical to SEQ ID NO: 5845

SEQ ID NO: 6010 - DNA, 201 bp, Homo sapiens; identical to SEQ ID NO: 5846

SEQ ID NO: 6011 - DNA, 201 bp, Homo sapiens; identical to SEQ ID NO: 5847

SEQ ID NO: 6012 - DNA, 201 bp, Homo sapiens; identical to SEQ ID NO: 5848

SEQ ID NO: 6013 - DNA, 201 bp, Homo sapiens; identical to SEQ ID NO: 5849

SEQ ID NO: 6014 - DNA, 201 bp, Homo sapiens; identical to SEQ ID NO: 5850

SEQ ID NO: 6015 - DNA, 201 bp, Homo sapiens; identical to SEQ ID NO: 5851

SEQ ID NO: 6016 - DNA, 201 bp, Homo sapiens; identical to SEQ ID NO: 5852

SEQ ID NO: 6017 - DNA, 201 bp, Homo sapiens; identical to SEQ ID NO: 5853

SEQ ID NO: 6018 - DNA, 201 bp, Homo sapiens; identical to SEQ ID NO: 5854

SEQ ID NO: 6019 - DNA, 201 bp, Homo sapiens; identical to SEQ ID NO: 5855

SEQ ID NO: 6020 - DNA, 201 bp, Homo sapiens; identical to SEQ ID NO: 5856

SEQ ID NO: 6021 - DNA, 201 bp, Homo sapiens; identical to SEQ ID NO: 5857

SEQ ID NO: 6022 - DNA, 201 bp, Homo sapiens; identical to SEQ ID NO: 5858

SEQ ID NO: 6023 - DNA, 201 bp, Homo sapiens; identical to SEQ ID NO: 5859

SEQ ID NO: 6024 - DNA, 201 bp, Homo sapiens; identical to SEQ ID NO: 5860

SEQ ID NO: 6025 - DNA, 201 bp, Homo sapiens; identical to SEQ ID NO: 5861

SEQ ID NO: 6026 - DNA, 201 bp, Homo sapiens; identical to SEQ ID NO: 5862

SEQ ID NO: 6027 - DNA, 201 bp, Homo sapiens; identical to SEQ ID NO: 5863

SEQ ID NO: 6028 - DNA, 201 bp, Homo sapiens; identical to SEQ ID NO: 5864

SEQ ID NO: 6029 - DNA, 201 bp, Homo sapiens; identical to SEQ ID NO: 5865

SEQ ID NO: 6030 - DNA, 201 bp, Homo sapiens; identical to SEQ ID NO: 5866

SEQ ID NO: 6031 - DNA, 201 bp, Homo sapiens; identical to SEQ ID NO: 5867

SEQ ID NO: 6032 - DNA, 201 bp, Homo sapiens; identical to SEQ ID NO: 5868

SEQ ID NO: 6033 - DNA, 201 bp, Homo sapiens; identical to SEQ ID NO: 5869

SEQ ID NO: 6034 - DNA, 201 bp, Homo sapiens; identical to SEQ ID NO: 5870

SEQ ID NO: 6035 - DNA, 201 bp, Homo sapiens; identical to SEQ ID NO: 5871

SEQ ID NO: 6036 - DNA, 201 bp, Homo sapiens; identical to SEQ ID NO: 5872

SEQ ID NO: 6037 - DNA, 201 bp, Homo sapiens; identical to SEQ ID NO: 5873

SEQ ID NO: 6038 - DNA, 201 bp, Homo sapiens; identical to SEQ ID NO: 5874

SEQ ID NO: 6039 - DNA, 201 bp, Homo sapiens; identical to SEQ ID NO: 5875

SEQ ID NO: 6040 - DNA, 201 bp, Homo sapiens; identical to SEQ ID NO: 5876

SEQ ID NO: 6041 - DNA, 201 bp, Homo sapiens; identical to SEQ ID NO: 5877

SEQ ID NO: 6042 - DNA, 201 bp, Homo sapiens; identical to SEQ ID NO: 5878

SEQ ID NO: 6043 - DNA, 201 bp, Homo sapiens; identical to SEQ ID NO: 5879

SEQ ID NO: 6044 - DNA, 201 bp, Homo sapiens; identical to SEQ ID NO: 5880

SEQ ID NO: 6045 - DNA, 201 bp, Homo sapiens; identical to SEQ ID NO: 5881

SEQ ID NO: 6046 - DNA, 201 bp, Homo sapiens; identical to SEQ ID NO: 5882

SEQ ID NO: 6047 - DNA, 201 bp, Homo sapiens; identical to SEQ ID NO: 5883

SEQ ID NO: 6048 - DNA, 201 bp, Homo sapiens; identical to SEQ ID NO: 5884

SEQ ID NO: 6049 - DNA, 201 bp, Homo sapiens; identical to SEQ ID NO: 5885

SEQ ID NO: 6050 - DNA, 201 bp, Homo sapiens; identical to SEQ ID NO: 5886

SEQ ID NO: 6051 - DNA, 201 bp, Homo sapiens; identical to SEQ ID NO: 5887

SEQ ID NO: 6052 - DNA, 201 bp, Homo sapiens; identical to SEQ ID NO: 5888

SEQ ID NO: 6053 - DNA, 201 bp, Homo sapiens; identical to SEQ ID NO: 5889

SEQ ID NO: 6054 - DNA, 201 bp, Homo sapiens; identical to SEQ ID NO: 5890

SEQ ID NO: 6055 - DNA, 201 bp, Homo sapiens; identical to SEQ ID NO: 5891

SEQ ID NO: 6056 - DNA, 201 bp, Homo sapiens; identical to SEQ ID NO: 5892

SEQ ID NO: 6057 - DNA, 201 bp, Homo sapiens; identical to SEQ ID NO: 5893

SEQ ID NO: 6058 - DNA, 201 bp, Homo sapiens; identical to SEQ ID NO: 2607

SEQ ID NO: 6059 - DNA, 201 bp, Homo sapiens; identical to SEQ ID NO: 5895

SEQ ID NO: 6060 - DNA, 201 bp, Homo sapiens; identical to SEQ ID NO: 5896

SEQ ID NO: 6061 - DNA, 201 bp, Homo sapiens; identical to SEQ ID NO: 5897

SEQ ID NO: 6062 - DNA, 201 bp, Homo sapiens; identical to SEQ ID NO: 5898

SEQ ID NO: 6063 - DNA, 201 bp, Homo sapiens; identical to SEQ ID NO: 5899

SEQ ID NO: 6064 - DNA, 201 bp, Homo sapiens; identical to SEQ ID NO: 5900

SEQ ID NO: 6065 - DNA, 201 bp, Homo sapiens; identical to SEQ ID NO: 5901

SEQ ID NO: 6066 - DNA, 201 bp, Homo sapiens; identical to SEQ ID NO: 5902

SEQ ID NO: 6067 - DNA, 201 bp, Homo sapiens; identical to SEQ ID NO: 5903

SEQ ID NO: 6068 - DNA, 201 bp, Homo sapiens; identical to SEQ ID NO: 5904

SEQ ID NO: 6069 - DNA, 201 bp, Homo sapiens; identical to SEQ ID NO: 5905

SEQ ID NO: 6070 - DNA, 201 bp, Homo sapiens; identical to SEQ ID NO: 5906

SEQ ID NO: 6071 - DNA, 201 bp, Homo sapiens; identical to SEQ ID NO: 5907

SEQ ID NO: 6072 - DNA, 201 bp, Homo sapiens; identical to SEQ ID NO: 5908

SEQ ID NO: 6073 - DNA, 201 bp, Homo sapiens; identical to SEQ ID NO: 5909

SEQ ID NO: 6074 - DNA, 201 bp, Homo sapiens; identical to SEQ ID NO: 5910

SEQ ID NO: 6075 - DNA, 201 bp, Homo sapiens; identical to SEQ ID NO: 5911

SEQ ID NO: 6076 - DNA, 201 bp, Homo sapiens; identical to SEQ ID NO: 5912

SEQ ID NO: 6077 - DNA, 201 bp, Homo sapiens; identical to SEQ ID NO: 5913

SEQ ID NO: 6078 - DNA, 201 bp, Homo sapiens; identical to SEQ ID NO: 5914

SEQ ID NO: 6079 - DNA, 201 bp, Homo sapiens; identical to SEQ ID NO: 5915

SEQ ID NO: 6080 - DNA, 201 bp, Homo sapiens; identical to SEQ ID NO: 5916

SEQ ID NO: 6081 - DNA, 201 bp, Homo sapiens; identical to SEQ ID NO: 5917

SEQ ID NO: 6082 - DNA, 201 bp, Homo sapiens; identical to SEQ ID NO: 5918

SEQ ID NO: 6083 - DNA, 201 bp, Homo sapiens; identical to SEQ ID NO: 5919

SEQ ID NO: 6084 - DNA, 201 bp, Homo sapiens; identical to SEQ ID NO: 5920

SEQ ID NO: 6085 - DNA, 201 bp, Homo sapiens; identical to SEQ ID NO: 5921

SEQ ID NO: 6086 - DNA, 201 bp, Homo sapiens; identical to SEQ ID NO: 5922

SEQ ID NO: 6087 - DNA, 201 bp, Homo sapiens; identical to SEQ ID NO: 5923

SEQ ID NO: 6088 - DNA, 201 bp, Homo sapiens; identical to SEQ ID NO: 5924

SEQ ID NO: 6089 - DNA, 201 bp, Homo sapiens; identical to SEQ ID NO: 5925

SEQ ID NO: 6090 - DNA, 201 bp, Homo sapiens; identical to SEQ ID NO: 5926

SEQ ID NO: 6091 - DNA, 201 bp, Homo sapiens; identical to SEQ ID NO: 5927

SEQ ID NO: 6092 - DNA, 201 bp, Homo sapiens; identical to SEQ ID NO: 5928

SEQ ID NO: 6093 - DNA, 201 bp, Homo sapiens; identical to SEQ ID NO: 5929

SEQ ID NO: 6094 - DNA, 201 bp, Homo sapiens; identical to SEQ ID NO: 5930

SEQ ID NO: 6095 - DNA, 201 bp, Homo sapiens; identical to SEQ ID NO: 5931

SEQ ID NO: 6096 - DNA, 201 bp, Homo sapiens; identical to SEQ ID NO: 5932

SEQ ID NO: 6097 - DNA, 201 bp, Homo sapiens; identical to SEQ ID NO: 5933

SEQ ID NO: 6098 - DNA, 201 bp, Homo sapiens; identical to SEQ ID NO: 5934

SEQ ID NO: 6099 - DNA, 201 bp, Homo sapiens; identical to SEQ ID NO: 5935

SEQ ID NO: 6100 - DNA, 201 bp, Homo sapiens; identical to SEQ ID NO: 5936

SEQ ID NO: 6101 - DNA, 201 bp, Homo sapiens; identical to SEQ ID NO: 5937

SEQ ID NO: 6102 - DNA, 201 bp, Homo sapiens; identical to SEQ ID NO: 2605

SEQ ID NO: 6103 - DNA, 201 bp, Homo sapiens; identical to SEQ ID NO: 5939

SEQ ID NO: 6104 - DNA, 201 bp, Homo sapiens; identical to SEQ ID NO: 5940

SEQ ID NO: 6105 - DNA, 201 bp, Homo sapiens; identical to SEQ ID NO: 5941

SEQ ID NO: 6106 - DNA, 201 bp, Homo sapiens; identical to SEQ ID NO: 5942

SEQ ID NO: 6107 - DNA, 201 bp, Homo sapiens; identical to SEQ ID NO: 5943

SEQ ID NO: 6108 - DNA, 201 bp, Homo sapiens; identical to SEQ ID NO: 5944

SEQ ID NO: 6109 - DNA, 201 bp, Homo sapiens; identical to SEQ ID NO: 5945

SEQ ID NO: 6110 - DNA, 201 bp, Homo sapiens; identical to SEQ ID NO: 5946

SEQ ID NO: 6111 - DNA, 201 bp, Homo sapiens; identical to SEQ ID NO: 5947

SEQ ID NO: 6112 - DNA, 201 bp, Homo sapiens; identical to SEQ ID NO: 5948

SEQ ID NO: 6113 - DNA, 201 bp, Homo sapiens; identical to SEQ ID NO: 5949

SEQ ID NO: 6114 - DNA, 201 bp, Homo sapiens; identical to SEQ ID NO: 5950

SEQ ID NO: 6115 - DNA, 201 bp, Homo sapiens; identical to SEQ ID NO: 5951

SEQ ID NO: 6116 - DNA, 201 bp, Homo sapiens; identical to SEQ ID NO: 5952

SEQ ID NO: 6117 - DNA, 201 bp, Homo sapiens; identical to SEQ ID NO: 5953

SEQ ID NO: 6118 - DNA, 201 bp, Homo sapiens; identical to SEQ ID NO: 5954

SEQ ID NO: 6119 - DNA, 201 bp, Homo sapiens; identical to SEQ ID NO: 5955

SEQ ID NO: 6120 - DNA, 201 bp, Homo sapiens; identical to SEQ ID NO: 5956

SEQ ID NO: 6121 - DNA, 201 bp, Homo sapiens; identical to SEQ ID NO: 5957

SEQ ID NO: 6122 - DNA, 201 bp, Homo sapiens; identical to SEQ ID NO: 5958

SEQ ID NO: 6123 - DNA, 201 bp, Homo sapiens; identical to SEQ ID NO: 5959

SEQ ID NO: 6124 - DNA, 201 bp, Homo sapiens; identical to SEQ ID NO: 5960

SEQ ID NO: 6125 - DNA, 201 bp, Homo sapiens; identical to SEQ ID NO: 5961

SEQ ID NO: 6126 - DNA, 201 bp, Homo sapiens; identical to SEQ ID NO: 5962

SEQ ID NO: 6127 - DNA, 201 bp, Homo sapiens; identical to SEQ ID NO: 5963

SEQ ID NO: 6128 - DNA, 201 bp, Homo sapiens; identical to SEQ ID NO: 5964

SEQ ID NO: 6129 - DNA, 201 bp, Homo sapiens; identical to SEQ ID NO: 5965

SEQ ID NO: 6130 - DNA, 201 bp, Homo sapiens; identical to SEQ ID NO: 5966

SEQ ID NO: 6131 - DNA, 201 bp, Homo sapiens; identical to SEQ ID NO: 5967

SEQ ID NO: 6132 - DNA, 201 bp, Homo sapiens; identical to SEQ ID NO: 5968

SEQ ID NO: 6133 - DNA, 201 bp, Homo sapiens; identical to SEQ ID NO: 5969

SEQ ID NO: 6134 - DNA, 201 bp, Homo sapiens; identical to SEQ ID NO: 5970

SEQ ID NO: 6135 - DNA, 201 bp, Homo sapiens; identical to SEQ ID NO: 5971

SEQ ID NO: 6136 - DNA, 201 bp, Homo sapiens; identical to SEQ ID NO: 5972

SEQ ID NO: 6137 - DNA, 201 bp, Homo sapiens; identical to SEQ ID NO: 5973

SEQ ID NO: 6138 - DNA, 201 bp, Homo sapiens; identical to SEQ ID NO: 5974

SEQ ID NO: 6139 - DNA, 201 bp, Homo sapiens; identical to SEQ ID NO: 5975

SEQ ID NO: 6140 - DNA, 201 bp, Homo sapiens; identical to SEQ ID NO: 5976

SEQ ID NO: 6141 - DNA, 201 bp, Homo sapiens; identical to SEQ ID NO: 5977

SEQ ID NO: 6142 - DNA, 201 bp, Homo sapiens; identical to SEQ ID NO: 5978

SEQ ID NO: 6143 - DNA, 201 bp, Homo sapiens; identical to SEQ ID NO: 5979

SEQ ID NO: 6144 - DNA, 201 bp, Homo sapiens; identical to SEQ ID NO: 5980

SEQ ID NO: 6145 - DNA, 201 bp, Homo sapiens; identical to SEQ ID NO: 5981

SEQ ID NO: 6146 - DNA, 201 bp, Homo sapiens; identical to SEQ ID NO: 5982

SEQ ID NO: 6147 - DNA, 201 bp, Homo sapiens; identical to SEQ ID NO: 5983

SEQ ID NO: 6148 - DNA, 201 bp, Homo sapiens; identical to SEQ ID NO: 5984

SEQ ID NO: 6149 - DNA, 201 bp, Homo sapiens; identical to SEQ ID NO: 5985

SEQ ID NO: 6150 - DNA, 201 bp, Homo sapiens; identical to SEQ ID NO: 5986

SEQ ID NO: 6151 - DNA, 201 bp, Homo sapiens; identical to SEQ ID NO: 5987

SEQ ID NO: 6152 - DNA, 201 bp, Homo sapiens; identical to SEQ ID NO: 5988

SEQ ID NO: 6153 - DNA, 201 bp, Homo sapiens; identical to SEQ ID NO: 5989

SEQ ID NO: 6154 - DNA, 201 bp, Homo sapiens; identical to SEQ ID NO: 5990

SEQ ID NO: 6155 - DNA, 201 bp, Homo sapiens
gggaattctgaccttcccttctgggctgtcatcctcatcggcttggcaggactcctgggactcatcacatgcctgatctgcggtgtcctggtgaccacccrccggcggaagaaggaaggagaatacaacgtccagcaacagtgcccaggctactaccagtcacacctagacctggaggatctgcaatgactggaacttgcc

SEQ ID NO: 6156 - DNA, 201 bp, Homo sapiens
cccacagtggacctgggaacatctgggactccagtttctaaacctggtccctcggccactggccctgtcctgctgccattcaccctcaattttaccatcaytaacctgcagtatgaggaggacatgcatcgccctggctccaggaagttcaacaccacggagagggtccttcagggtctggtgagacccctttcaagaaca

SEQ ID NO: 6157 - DNA, 201 bp, Homo sapiens
atggggcagccaccaaagtggatgccatctgcacctaccgccctgatcccaaaagccctggactggacagagagcagctatactgggagctgagccagctracccacagcatcactgagctgggcccctacaccctggacagggacagtctctatgtcaatggtttcacacagcggagctctgtgcccaccactagcattc

SEQ ID NO: 6158 - DNA, 201 bp, Homo sapiens
tgtggatgggtattctcccaacagaaatgagcccttaactgggaattctgaccttcccttctgggctgtcatcctcatcggcttggcaggactcctgggastcatcacatgcctgatctgcggtgtcctggtgaccacccgccggcggaagaaggaaggagaatacaacgtccagcaacagtgcccaggctactaccagtc

SEQ ID NO: 6159 - DNA, 201 bp, Homo sapiens
gagctgagccagctgacccacagcatcactgagctgggcccctacacactggacagggacagtctctatgtcaatggtttcacccatcggagctctgtacycaccaccagcaccggggtggtcagcgaggagccattcacactgaacttcaccatcaacaacctgcgctacatggcggacatgggccaacccggctccctc

SEQ ID NO: 6160 - DNA, 201 bp, Homo sapiens
atcctcagagtacatcaccctgctgagggacatccaggacaaggtcaccacactctacaaaggcagtcaactacatgacacattccgcttctgcctggtcrccaacttgacgatggactccgtgttggtcactgtcaaggcattgttctcctccaatttggaccccagcctggtggagcaagtctttctagataagaccct

SEQ ID NO: 6161 - DNA, 201 bp, Homo sapiens
actccagtttctaaacctggtccctcggccactggccctgtcctgctgccattcaccctcaattttaccatcattaacctgcagtatgaggaggacatgcrtcgccctggctccaggaagttcaacaccacggagagggtccttcagggtctggtgagacccctttcaagaacaccagtgtcagctctctgtactctggtt

SEQ ID NO: 6162 - DNA, 201 bp, Homo sapiens
ggagccattcacactgaacttcaccatcaacaacctgcgctacatggcggacatgggccaacccggctccctcaagttcaacatcacagacaacgtcatgmagcacctgctcagtcctttgttccagaggagcagcctgggtgcacggtacacaggctgcagggtcatcgcactaaggtctgtgaagaacggtgctgagac

SEQ ID NO: 6163 - DNA, 201 bp, Homo sapiens
agctgacccacagcatcactgagctgggcccctacacactggacagggacagtctctatgtcaatggtttcacccatcggagctctgtacccaccaccagsaccggggtggtcagcgaggagccattcacactgaacttcaccatcaacaacctgcgctacatggcggacatgggccaacccggctccctcaagttcaaca

SEQ ID NO: 6164 - DNA, 201 bp, Homo sapiens
aatttatcaatccggggcgagtaccagataaatttccacattgtcaactggaacctcagtaatccagaccccacatcctcagagtacatcaccctgctgarggacatccaggacaaggtcaccacactctacaaaggcagtcaactacatgacacattccgcttctgcctggtcaccaacttgacgatggactccgtgttg

SEQ ID NO: 6165 - DNA, 201 bp, Homo sapiens
cattgtcaactggaacctcagtaatccagaccccacatcctcagagtacatcaccctgctgagggacatccaggacaaggtcaccacactctacaaaggcmgtcaactacatgacacattccgcttctgcctggtcaccaacttgacgatggactccgtgttggtcactgtcaaggcattgttctcctccaatttggaccc

SEQ ID NO: 6166 - DNA, 201 bp, Homo sapiens
cctgggtgcacggtacacaggctgcagggtcatcgcactaaggtctgtgaagaacggtgctgagacacgggtggacctcctctgcacctacctgcagcccytcagcggcccaggtctgcctatcaagcaggtgttccatgagctgagccagcagacccatggcatcacccggctgggcccctactctctggacaaagacag

SEQ ID NO: 6167 - DNA, 201 bp, Homo sapiens; identical to SEQ ID NO: 5827

SEQ ID NO: 6168 - DNA, 201 bp, Homo sapiens; identical to SEQ ID NO: 5828

SEQ ID NO: 6169 - DNA, 201 bp, Homo sapiens; identical to SEQ ID NO: 5829

SEQ ID NO: 6170 - DNA, 201 bp, Homo sapiens; identical to SEQ ID NO: 5830

SEQ ID NO: 6171 - DNA, 201 bp, Homo sapiens; identical to SEQ ID NO: 5831

SEQ ID NO: 6172 - DNA, 201 bp, Homo sapiens; identical to SEQ ID NO: 5832

SEQ ID NO: 6173 - DNA, 201 bp, Homo sapiens; identical to SEQ ID NO: 5833

SEQ ID NO: 6174 - DNA, 201 bp, Homo sapiens; identical to SEQ ID NO: 5834

SEQ ID NO: 6175 - DNA, 201 bp, Homo sapiens; identical to SEQ ID NO: 5835

SEQ ID NO: 6176 - DNA, 201 bp, Homo sapiens; identical to SEQ ID NO: 5836

SEQ ID NO: 6177 - DNA, 201 bp, Homo sapiens; identical to SEQ ID NO: 5837

SEQ ID NO: 6178 - DNA, 201 bp, Homo sapiens; identical to SEQ ID NO: 5838

SEQ ID NO: 6179 - DNA, 201 bp, Homo sapiens; identical to SEQ ID NO: 5839

SEQ ID NO: 6180 - DNA, 201 bp, Homo sapiens; identical to SEQ ID NO: 5840

SEQ ID NO: 6181 - DNA, 201 bp, Homo sapiens; identical to SEQ ID NO: 5841

SEQ ID NO: 6182 - DNA, 201 bp, Homo sapiens; identical to SEQ ID NO: 5842

SEQ ID NO: 6183 - DNA, 201 bp, Homo sapiens; identical to SEQ ID NO: 5843

SEQ ID NO: 6184 - DNA, 201 bp, Homo sapiens; identical to SEQ ID NO: 5844

SEQ ID NO: 6185 - DNA, 201 bp, Homo sapiens; identical to SEQ ID NO: 5845

SEQ ID NO: 6186 - DNA, 201 bp, Homo sapiens; identical to SEQ ID NO: 5846

SEQ ID NO: 6187 - DNA, 201 bp, Homo sapiens; identical to SEQ ID NO: 5847

SEQ ID NO: 6188 - DNA, 201 bp, Homo sapiens; identical to SEQ ID NO: 5848

SEQ ID NO: 6189 - DNA, 201 bp, Homo sapiens; identical to SEQ ID NO: 5849

SEQ ID NO: 6190 - DNA, 201 bp, Homo sapiens; identical to SEQ ID NO: 5850

SEQ ID NO: 6191 - DNA, 201 bp, Homo sapiens; identical to SEQ ID NO: 5851

SEQ ID NO: 6192 - DNA, 201 bp, Homo sapiens; identical to SEQ ID NO: 5852

SEQ ID NO: 6193 - DNA, 201 bp, Homo sapiens; identical to SEQ ID NO: 5853

SEQ ID NO: 6194 - DNA, 201 bp, Homo sapiens; identical to SEQ ID NO: 5854

SEQ ID NO: 6195 - DNA, 201 bp, Homo sapiens; identical to SEQ ID NO: 5855

SEQ ID NO: 6196 - DNA, 201 bp, Homo sapiens; identical to SEQ ID NO: 5856

SEQ ID NO: 6197 - DNA, 201 bp, Homo sapiens; identical to SEQ ID NO: 5857

SEQ ID NO: 6198 - DNA, 201 bp, Homo sapiens; identical to SEQ ID NO: 5858

SEQ ID NO: 6199 - DNA, 201 bp, Homo sapiens; identical to SEQ ID NO: 5859

SEQ ID NO: 6200 - DNA, 201 bp, Homo sapiens; identical to SEQ ID NO: 5860

SEQ ID NO: 6201 - DNA, 201 bp, Homo sapiens; identical to SEQ ID NO: 5861

SEQ ID NO: 6202 - DNA, 201 bp, Homo sapiens; identical to SEQ ID NO: 5862

SEQ ID NO: 6203 - DNA, 201 bp, Homo sapiens; identical to SEQ ID NO: 5863

SEQ ID NO: 6204 - DNA, 201 bp, Homo sapiens
gcctccctccctggccacacagcccctggccctctcctggtgccattcaccctcaacttcactatcaccaacctgcagtatgaggaggacttagtcccatwttcaagaactccagtgttggccctctgtactctggctgcagactgacctctctcaggcccgagaaggatggggcagcaactggaatggatgctgtctgcc

SEQ ID NO: 6205 - DNA, 201 bp, Homo sapiens; identical to SEQ ID NO: 5864

SEQ ID NO: 6206 - DNA, 201 bp, Homo sapiens; identical to SEQ ID NO: 5865

SEQ ID NO: 6207 - DNA, 201 bp, Homo sapiens; identical to SEQ ID NO: 5866

SEQ ID NO: 6208 - DNA, 201 bp, Homo sapiens; identical to SEQ ID NO: 5867

SEQ ID NO: 6209 - DNA, 201 bp, Homo sapiens; identical to SEQ ID NO: 5868

SEQ ID NO: 6210 - DNA, 201 bp, Homo sapiens; identical to SEQ ID NO: 5869

SEQ ID NO: 6211 - DNA, 201 bp, Homo sapiens; identical to SEQ ID NO: 5870

SEQ ID NO: 6212 - DNA, 201 bp, Homo sapiens; identical to SEQ ID NO: 5871

SEQ ID NO: 6213 - DNA, 201 bp, Homo sapiens; identical to SEQ ID NO: 5872

SEQ ID NO: 6214 - DNA, 201 bp, Homo sapiens; identical to SEQ ID NO: 5873

SEQ ID NO: 6215 - DNA, 201 bp, Homo sapiens; identical to SEQ ID NO: 5874

SEQ ID NO: 6216 - DNA, 201 bp, Homo sapiens; identical to SEQ ID NO: 5875

SEQ ID NO: 6217 - DNA, 201 bp, Homo sapiens; identical to SEQ ID NO: 5876

SEQ ID NO: 6218 - DNA, 201 bp, Homo sapiens; identical to SEQ ID NO: 5877

SEQ ID NO: 6219 - DNA, 201 bp, Homo sapiens; identical to SEQ ID NO: 5878

SEQ ID NO: 6220 - DNA, 201 bp, Homo sapiens; identical to SEQ ID NO: 5879

SEQ ID NO: 6221 - DNA, 201 bp, Homo sapiens; identical to SEQ ID NO: 5880

SEQ ID NO: 6222 - DNA, 201 bp, Homo sapiens; identical to SEQ ID NO: 5881

SEQ ID NO: 6223 - DNA, 201 bp, Homo sapiens; identical to SEQ ID NO: 5882

SEQ ID NO: 6224 - DNA, 201 bp, Homo sapiens; identical to SEQ ID NO: 5883

SEQ ID NO: 6225 - DNA, 201 bp, Homo sapiens; identical to SEQ ID NO: 5884

SEQ ID NO: 6226 - DNA, 201 bp, Homo sapiens; identical to SEQ ID NO: 5885

SEQ ID NO: 6227 - DNA, 201 bp, Homo sapiens; identical to SEQ ID NO: 5886

SEQ ID NO: 6228 - DNA, 201 bp, Homo sapiens; identical to SEQ ID NO: 5887

SEQ ID NO: 6229 - DNA, 201 bp, Homo sapiens; identical to SEQ ID NO: 5888

SEQ ID NO: 6230 - DNA, 201 bp, Homo sapiens; identical to SEQ ID NO: 5889

SEQ ID NO: 6231 - DNA, 201 bp, Homo sapiens; identical to SEQ ID NO: 5890

SEQ ID NO: 6232 - DNA, 201 bp, Homo sapiens; identical to SEQ ID NO: 5891

SEQ ID NO: 6233 - DNA, 201 bp, Homo sapiens; identical to SEQ ID NO: 5892

SEQ ID NO: 6234 - DNA, 201 bp, Homo sapiens; identical to SEQ ID NO: 5893

SEQ ID NO: 6235 - DNA, 201 bp, Homo sapiens; identical to SEQ ID NO: 2607

SEQ ID NO: 6236 - DNA, 201 bp, Homo sapiens; identical to SEQ ID NO: 5895

SEQ ID NO: 6237 - DNA, 201 bp, Homo sapiens; identical to SEQ ID NO: 5896

SEQ ID NO: 6238 - DNA, 201 bp, Homo sapiens; identical to SEQ ID NO: 5897

SEQ ID NO: 6239 - DNA, 201 bp, Homo sapiens; identical to SEQ ID NO: 5898

SEQ ID NO: 6240 - DNA, 201 bp, Homo sapiens; identical to SEQ ID NO: 5899

SEQ ID NO: 6241 - DNA, 201 bp, Homo sapiens; identical to SEQ ID NO: 5900

SEQ ID NO: 6242 - DNA, 201 bp, Homo sapiens; identical to SEQ ID NO: 5901

SEQ ID NO: 6243 - DNA, 201 bp, Homo sapiens; identical to SEQ ID NO: 5902

SEQ ID NO: 6244 - DNA, 201 bp, Homo sapiens; identical to SEQ ID NO: 5903

SEQ ID NO: 6245 - DNA, 201 bp, Homo sapiens; identical to SEQ ID NO: 5904

SEQ ID NO: 6246 - DNA, 201 bp, Homo sapiens; identical to SEQ ID NO: 5905

SEQ ID NO: 6247 - DNA, 201 bp, Homo sapiens; identical to SEQ ID NO: 5906

SEQ ID NO: 6248 - DNA, 201 bp, Homo sapiens; identical to SEQ ID NO: 5907

SEQ ID NO: 6249 - DNA, 201 bp, Homo sapiens; identical to SEQ ID NO: 5908

SEQ ID NO: 6250 - DNA, 201 bp, Homo sapiens; identical to SEQ ID NO: 5909

SEQ ID NO: 6251 - DNA, 201 bp, Homo sapiens; identical to SEQ ID NO: 5910

SEQ ID NO: 6252 - DNA, 201 bp, Homo sapiens; identical to SEQ ID NO: 5911

SEQ ID NO: 6253 - DNA, 201 bp, Homo sapiens; identical to SEQ ID NO: 5912

SEQ ID NO: 6254 - DNA, 201 bp, Homo sapiens; identical to SEQ ID NO: 5913

SEQ ID NO: 6255 - DNA, 201 bp, Homo sapiens; identical to SEQ ID NO: 5914

SEQ ID NO: 6256 - DNA, 201 bp, Homo sapiens; identical to SEQ ID NO: 5915

SEQ ID NO: 6257 - DNA, 201 bp, Homo sapiens; identical to SEQ ID NO: 5916

SEQ ID NO: 6258 - DNA, 201 bp, Homo sapiens; identical to SEQ ID NO: 5917

SEQ ID NO: 6259 - DNA, 201 bp, Homo sapiens; identical to SEQ ID NO: 5918

SEQ ID NO: 6260 - DNA, 201 bp, Homo sapiens; identical to SEQ ID NO: 5919

SEQ ID NO: 6261 - DNA, 201 bp, Homo sapiens; identical to SEQ ID NO: 5920

SEQ ID NO: 6262 - DNA, 201 bp, Homo sapiens; identical to SEQ ID NO: 5921

SEQ ID NO: 6263 - DNA, 201 bp, Homo sapiens; identical to SEQ ID NO: 5922

SEQ ID NO: 6264 - DNA, 201 bp, Homo sapiens; identical to SEQ ID NO: 5923

SEQ ID NO: 6265 - DNA, 201 bp, Homo sapiens; identical to SEQ ID NO: 5924

SEQ ID NO: 6266 - DNA, 201 bp, Homo sapiens; identical to SEQ ID NO: 5925

SEQ ID NO: 6267 - DNA, 201 bp, Homo sapiens; identical to SEQ ID NO: 5926

SEQ ID NO: 6268 - DNA, 201 bp, Homo sapiens; identical to SEQ ID NO: 5927

SEQ ID NO: 6269 - DNA, 201 bp, Homo sapiens; identical to SEQ ID NO: 5928

SEQ ID NO: 6270 - DNA, 201 bp, Homo sapiens; identical to SEQ ID NO: 5929

SEQ ID NO: 6271 - DNA, 201 bp, Homo sapiens; identical to SEQ ID NO: 5930

SEQ ID NO: 6272 - DNA, 201 bp, Homo sapiens; identical to SEQ ID NO: 5931

SEQ ID NO: 6273 - DNA, 201 bp, Homo sapiens; identical to SEQ ID NO: 5932

SEQ ID NO: 6274 - DNA, 201 bp, Homo sapiens; identical to SEQ ID NO: 5933

SEQ ID NO: 6275 - DNA, 201 bp, Homo sapiens; identical to SEQ ID NO: 5934

SEQ ID NO: 6276 - DNA, 201 bp, Homo sapiens; identical to SEQ ID NO: 5935

SEQ ID NO: 6277 - DNA, 201 bp, Homo sapiens; identical to SEQ ID NO: 5936

SEQ ID NO: 6278 - DNA, 201 bp, Homo sapiens; identical to SEQ ID NO: 5937

SEQ ID NO: 6279 - DNA, 201 bp, Homo sapiens; identical to SEQ ID NO: 2605

SEQ ID NO: 6280 - DNA, 201 bp, Homo sapiens; identical to SEQ ID NO: 5939

SEQ ID NO: 6281 - DNA, 201 bp, Homo sapiens; identical to SEQ ID NO: 5940

SEQ ID NO: 6282 - DNA, 201 bp, Homo sapiens; identical to SEQ ID NO: 5941

SEQ ID NO: 6283 - DNA, 201 bp, Homo sapiens; identical to SEQ ID NO: 5942

SEQ ID NO: 6284 - DNA, 201 bp, Homo sapiens; identical to SEQ ID NO: 5943

SEQ ID NO: 6285 - DNA, 201 bp, Homo sapiens; identical to SEQ ID NO: 5944

SEQ ID NO: 6286 - DNA, 201 bp, Homo sapiens; identical to SEQ ID NO: 5945

SEQ ID NO: 6287 - DNA, 201 bp, Homo sapiens; identical to SEQ ID NO: 5946

SEQ ID NO: 6288 - DNA, 201 bp, Homo sapiens; identical to SEQ ID NO: 5947

SEQ ID NO: 6289 - DNA, 201 bp, Homo sapiens; identical to SEQ ID NO: 5948

SEQ ID NO: 6290 - DNA, 201 bp, Homo sapiens; identical to SEQ ID NO: 5949

SEQ ID NO: 6291 - DNA, 201 bp, Homo sapiens; identical to SEQ ID NO: 5950

SEQ ID NO: 6292 - DNA, 201 bp, Homo sapiens; identical to SEQ ID NO: 5951

SEQ ID NO: 6293 - DNA, 201 bp, Homo sapiens; identical to SEQ ID NO: 5952

SEQ ID NO: 6294 - DNA, 201 bp, Homo sapiens; identical to SEQ ID NO: 5953

SEQ ID NO: 6295 - DNA, 201 bp, Homo sapiens; identical to SEQ ID NO: 5954

SEQ ID NO: 6296 - DNA, 201 bp, Homo sapiens; identical to SEQ ID NO: 5955

SEQ ID NO: 6297 - DNA, 201 bp, Homo sapiens; identical to SEQ ID NO: 5956

SEQ ID NO: 6298 - DNA, 201 bp, Homo sapiens; identical to SEQ ID NO: 5957

SEQ ID NO: 6299 - DNA, 201 bp, Homo sapiens; identical to SEQ ID NO: 5958

SEQ ID NO: 6300 - DNA, 201 bp, Homo sapiens; identical to SEQ ID NO: 5959

SEQ ID NO: 6301 - DNA, 201 bp, Homo sapiens; identical to SEQ ID NO: 5960

SEQ ID NO: 6302 - DNA, 201 bp, Homo sapiens; identical to SEQ ID NO: 5961

SEQ ID NO: 6303 - DNA, 201 bp, Homo sapiens; identical to SEQ ID NO: 5962

SEQ ID NO: 6304 - DNA, 201 bp, Homo sapiens; identical to SEQ ID NO: 5963

SEQ ID NO: 6305 - DNA, 201 bp, Homo sapiens; identical to SEQ ID NO: 5964

SEQ ID NO: 6306 - DNA, 201 bp, Homo sapiens; identical to SEQ ID NO: 5965

SEQ ID NO: 6307 - DNA, 201 bp, Homo sapiens; identical to SEQ ID NO: 5966

SEQ ID NO: 6308 - DNA, 201 bp, Homo sapiens; identical to SEQ ID NO: 5967

SEQ ID NO: 6309 - DNA, 201 bp, Homo sapiens; identical to SEQ ID NO: 5968

SEQ ID NO: 6310 - DNA, 201 bp, Homo sapiens; identical to SEQ ID NO: 5969

SEQ ID NO: 6311 - DNA, 201 bp, Homo sapiens; identical to SEQ ID NO: 5970

SEQ ID NO: 6312 - DNA, 201 bp, Homo sapiens; identical to SEQ ID NO: 5971

SEQ ID NO: 6313 - DNA, 201 bp, Homo sapiens; identical to SEQ ID NO: 5972

SEQ ID NO: 6314 - DNA, 201 bp, Homo sapiens; identical to SEQ ID NO: 5973

SEQ ID NO: 6315 - DNA, 201 bp, Homo sapiens; identical to SEQ ID NO: 5974

SEQ ID NO: 6316 - DNA, 201 bp, Homo sapiens; identical to SEQ ID NO: 5975

SEQ ID NO: 6317 - DNA, 201 bp, Homo sapiens; identical to SEQ ID NO: 5976

SEQ ID NO: 6318 - DNA, 201 bp, Homo sapiens; identical to SEQ ID NO: 5977

SEQ ID NO: 6319 - DNA, 201 bp, Homo sapiens; identical to SEQ ID NO: 5978

SEQ ID NO: 6320 - DNA, 201 bp, Homo sapiens; identical to SEQ ID NO: 5979

SEQ ID NO: 6321 - DNA, 201 bp, Homo sapiens; identical to SEQ ID NO: 5980

SEQ ID NO: 6322 - DNA, 201 bp, Homo sapiens; identical to SEQ ID NO: 5981

SEQ ID NO: 6323 - DNA, 201 bp, Homo sapiens; identical to SEQ ID NO: 5982

SEQ ID NO: 6324 - DNA, 201 bp, Homo sapiens; identical to SEQ ID NO: 5983

SEQ ID NO: 6325 - DNA, 201 bp, Homo sapiens; identical to SEQ ID NO: 5984

SEQ ID NO: 6326 - DNA, 201 bp, Homo sapiens; identical to SEQ ID NO: 5985

SEQ ID NO: 6327 - DNA, 201 bp, Homo sapiens; identical to SEQ ID NO: 5986

SEQ ID NO: 6328 - DNA, 201 bp, Homo sapiens; identical to SEQ ID NO: 5987

SEQ ID NO: 6329 - DNA, 201 bp, Homo sapiens; identical to SEQ ID NO: 5988

SEQ ID NO: 6330 - DNA, 201 bp, Homo sapiens; identical to SEQ ID NO: 5989

SEQ ID NO: 6331 - DNA, 201 bp, Homo sapiens; identical to SEQ ID NO: 5990

SEQ ID NO: 6332 - DNA, 201 bp, Homo sapiens; identical to SEQ ID NO: 5827

SEQ ID NO: 6333 - DNA, 201 bp, Homo sapiens; identical to SEQ ID NO: 5828

SEQ ID NO: 6334 - DNA, 201 bp, Homo sapiens; identical to SEQ ID NO: 5829

SEQ ID NO: 6335 - DNA, 201 bp, Homo sapiens; identical to SEQ ID NO: 5830

SEQ ID NO: 6336 - DNA, 201 bp, Homo sapiens; identical to SEQ ID NO: 5831

SEQ ID NO: 6337 - DNA, 201 bp, Homo sapiens; identical to SEQ ID NO: 5832

SEQ ID NO: 6338 - DNA, 201 bp, Homo sapiens; identical to SEQ ID NO: 5833

SEQ ID NO: 6339 - DNA, 201 bp, Homo sapiens; identical to SEQ ID NO: 5835

SEQ ID NO: 6340 - DNA, 201 bp, Homo sapiens; identical to SEQ ID NO: 5834

SEQ ID NO: 6341 - DNA, 201 bp, Homo sapiens; identical to SEQ ID NO: 5836

SEQ ID NO: 6342 - DNA, 201 bp, Homo sapiens; identical to SEQ ID NO: 5837

SEQ ID NO: 6343 - DNA, 201 bp, Homo sapiens; identical to SEQ ID NO: 5838

SEQ ID NO: 6344 - DNA, 201 bp, Homo sapiens; identical to SEQ ID NO: 5839

SEQ ID NO: 6345 - DNA, 201 bp, Homo sapiens; identical to SEQ ID NO: 5840

SEQ ID NO: 6346 - DNA, 201 bp, Homo sapiens; identical to SEQ ID NO: 5841

SEQ ID NO: 6347 - DNA, 201 bp, Homo sapiens; identical to SEQ ID NO: 5842

SEQ ID NO: 6348 - DNA, 201 bp, Homo sapiens; identical to SEQ ID NO: 5844

SEQ ID NO: 6349 - DNA, 201 bp, Homo sapiens; identical to SEQ ID NO: 5843

SEQ ID NO: 6350 - DNA, 201 bp, Homo sapiens; identical to SEQ ID NO: 5845

SEQ ID NO: 6351 - DNA, 201 bp, Homo sapiens; identical to SEQ ID NO: 5846

SEQ ID NO: 6352 - DNA, 201 bp, Homo sapiens; identical to SEQ ID NO: 5847

SEQ ID NO: 6353 - DNA, 201 bp, Homo sapiens; identical to SEQ ID NO: 5848

SEQ ID NO: 6354 - DNA, 201 bp, Homo sapiens; identical to SEQ ID NO: 5849

SEQ ID NO: 6355 - DNA, 201 bp, Homo sapiens; identical to SEQ ID NO: 5850

SEQ ID NO: 6356 - DNA, 201 bp, Homo sapiens; identical to SEQ ID NO: 5851

SEQ ID NO: 6357 - DNA, 201 bp, Homo sapiens; identical to SEQ ID NO: 5852

SEQ ID NO: 6358 - DNA, 201 bp, Homo sapiens; identical to SEQ ID NO: 5853

SEQ ID NO: 6359 - DNA, 201 bp, Homo sapiens; identical to SEQ ID NO: 6164

SEQ ID NO: 6360 - DNA, 201 bp, Homo sapiens; identical to SEQ ID NO: 5854

SEQ ID NO: 6361 - DNA, 201 bp, Homo sapiens; identical to SEQ ID NO: 5855

SEQ ID NO: 6362 - DNA, 201 bp, Homo sapiens; identical to SEQ ID NO: 5856

SEQ ID NO: 6363 - DNA, 201 bp, Homo sapiens; identical to SEQ ID NO: 5857

SEQ ID NO: 6364 - DNA, 201 bp, Homo sapiens; identical to SEQ ID NO: 5858

SEQ ID NO: 6365 - DNA, 201 bp, Homo sapiens; identical to SEQ ID NO: 5859

SEQ ID NO: 6366 - DNA, 201 bp, Homo sapiens; identical to SEQ ID NO: 5860

SEQ ID NO: 6367 - DNA, 201 bp, Homo sapiens
tgcagtatgaggaggacatgcgtcaccctggttccaggaagttcaacaccacggagagagtcctgcaggctgctggccctctcctggtgccattcaccctmaacttcaccatcaccaacctgcagtatgaggaggacatgcatcgccctggatctaggaagttcaacgccacagagagggtcctgcagggtctgcttagtc

SEQ ID NO: 6368 - DNA, 201 bp, Homo sapiens; identical to SEQ ID NO: 5861

SEQ ID NO: 6369 - DNA, 201 bp, Homo sapiens
ggctgctggccctctcctggtgccattcaccctaaacttcaccatcaccaacctgcagtatgaggaggacatgcatcgccctggatctaggaagttcaacrccacagagagggtcctgcagggtctgcttagtcccatattcaagaactccagtgttggccctctgtactctggctgcagactgacctacagagagcagct

SEQ ID NO: 6370 - DNA, 201 bp, Homo sapiens; identical to SEQ ID NO: 5862

SEQ ID NO: 6371 - DNA, 201 bp, Homo sapiens; identical to SEQ ID NO: 5863

SEQ ID NO: 6372 - DNA, 201 bp, Homo sapiens
atggggcagccaccaaagtggatgccatctgcacctaccgccctgatcccaaaagccctggactggacagagagcagctatactgggagctgagccagctracccacagcatcactgagctgggcccctacaccctggacagggacagtctctatgtcaatggtttcacacagcggagctctgtgcccaccacacagccac

SEQ ID NO: 6373 - DNA, 201 bp, Homo sapiens; identical to SEQ ID NO: 5864

SEQ ID NO: 6374 - DNA, 201 bp, Homo sapiens
tcaccatcaccaacctgcagtatgaggaggacatgcatcgccctggatctaggaagttcaacgccacagagagggtcctgcagggtctgcttagtcccatwttcaagaactccagtgttggccctctgtactctggctgcagactgacctacagagagcagctgtactgggagctaagccagctgacccacaacatcactg

SEQ ID NO: 6375 - DNA, 201 bp, Homo sapiens; identical to SEQ ID NO: 5865

SEQ ID NO: 6376 - DNA, 201 bp, Homo sapiens; identical to SEQ ID NO: 5866

SEQ ID NO: 6377 - DNA, 201 bp, Homo sapiens; identical to SEQ ID NO: 5867

SEQ ID NO: 6378 - DNA, 201 bp, Homo sapiens; identical to SEQ ID NO: 5868

SEQ ID NO: 6379 - DNA, 201 bp, Homo sapiens; identical to SEQ ID NO: 5869

SEQ ID NO: 6380 - DNA, 201 bp, Homo sapiens; identical to SEQ ID NO: 5870

SEQ ID NO: 6381 - DNA, 201 bp, Homo sapiens; identical to SEQ ID NO: 5871

SEQ ID NO: 6382 - DNA, 201 bp, Homo sapiens; identical to SEQ ID NO: 5872

SEQ ID NO: 6383 - DNA, 201 bp, Homo sapiens; identical to SEQ ID NO: 5873

SEQ ID NO: 6384 - DNA, 201 bp, Homo sapiens; identical to SEQ ID NO: 5874

SEQ ID NO: 6385 - DNA, 201 bp, Homo sapiens; identical to SEQ ID NO: 5875

SEQ ID NO: 6386 - DNA, 201 bp, Homo sapiens; identical to SEQ ID NO: 5877

SEQ ID NO: 6387 - DNA, 201 bp, Homo sapiens; identical to SEQ ID NO: 5876

SEQ ID NO: 6388 - DNA, 201 bp, Homo sapiens; identical to SEQ ID NO: 5879

SEQ ID NO: 6389 - DNA, 201 bp, Homo sapiens; identical to SEQ ID NO: 5878

SEQ ID NO: 6390 - DNA, 201 bp, Homo sapiens; identical to SEQ ID NO: 5880

SEQ ID NO: 6391 - DNA, 201 bp, Homo sapiens; identical to SEQ ID NO: 5881

SEQ ID NO: 6392 - DNA, 201 bp, Homo sapiens; identical to SEQ ID NO: 5882

SEQ ID NO: 6393 - DNA, 201 bp, Homo sapiens; identical to SEQ ID NO: 5883

SEQ ID NO: 6394 - DNA, 201 bp, Homo sapiens; identical to SEQ ID NO: 5884

SEQ ID NO: 6395 - DNA, 201 bp, Homo sapiens; identical to SEQ ID NO: 6162

SEQ ID NO: 6396 - DNA, 201 bp, Homo sapiens; identical to SEQ ID NO: 6159

SEQ ID NO: 6397 - DNA, 201 bp, Homo sapiens; identical to SEQ ID NO: 5885

SEQ ID NO: 6398 - DNA, 201 bp, Homo sapiens; identical to SEQ ID NO: 5886

SEQ ID NO: 6399 - DNA, 201 bp, Homo sapiens; identical to SEQ ID NO: 6165

SEQ ID NO: 6400 - DNA, 201 bp, Homo sapiens; identical to SEQ ID NO: 6166

SEQ ID NO: 6401 - DNA, 201 bp, Homo sapiens; identical to SEQ ID NO: 5887

SEQ ID NO: 6402 - DNA, 201 bp, Homo sapiens; identical to SEQ ID NO: 5888

SEQ ID NO: 6403 - DNA, 201 bp, Homo sapiens; identical to SEQ ID NO: 5889

SEQ ID NO: 6404 - DNA, 201 bp, Homo sapiens; identical to SEQ ID NO: 5891

SEQ ID NO: 6405 - DNA, 201 bp, Homo sapiens; identical to SEQ ID NO: 5895

SEQ ID NO: 6406 - DNA, 201 bp, Homo sapiens; identical to SEQ ID NO: 2607

SEQ ID NO: 6407 - DNA, 201 bp, Homo sapiens; identical to SEQ ID NO: 5893

SEQ ID NO: 6408 - DNA, 201 bp, Homo sapiens; identical to SEQ ID NO: 5896

SEQ ID NO: 6409 - DNA, 201 bp, Homo sapiens; identical to SEQ ID NO: 5897

SEQ ID NO: 6410 - DNA, 201 bp, Homo sapiens; identical to SEQ ID NO: 5899

SEQ ID NO: 6411 - DNA, 201 bp, Homo sapiens; identical to SEQ ID NO: 5898

SEQ ID NO: 6412 - DNA, 201 bp, Homo sapiens; identical to SEQ ID NO: 5900

SEQ ID NO: 6413 - DNA, 201 bp, Homo sapiens; identical to SEQ ID NO: 5901

SEQ ID NO: 6414 - DNA, 201 bp, Homo sapiens; identical to SEQ ID NO: 5902

SEQ ID NO: 6415 - DNA, 201 bp, Homo sapiens; identical to SEQ ID NO: 5903

SEQ ID NO: 6416 - DNA, 201 bp, Homo sapiens; identical to SEQ ID NO: 5904

SEQ ID NO: 6417 - DNA, 201 bp, Homo sapiens; identical to SEQ ID NO: 5905

SEQ ID NO: 6418 - DNA, 201 bp, Homo sapiens; identical to SEQ ID NO: 5906

SEQ ID NO: 6419 - DNA, 201 bp, Homo sapiens; identical to SEQ ID NO: 5907

SEQ ID NO: 6420 - DNA, 201 bp, Homo sapiens; identical to SEQ ID NO: 5908

SEQ ID NO: 6421 - DNA, 201 bp, Homo sapiens; identical to SEQ ID NO: 5909

SEQ ID NO: 6422 - DNA, 201 bp, Homo sapiens; identical to SEQ ID NO: 5910

SEQ ID NO: 6423 - DNA, 201 bp, Homo sapiens; identical to SEQ ID NO: 5911

SEQ ID NO: 6424 - DNA, 201 bp, Homo sapiens; identical to SEQ ID NO: 5912

SEQ ID NO: 6425 - DNA, 201 bp, Homo sapiens; identical to SEQ ID NO: 5913

SEQ ID NO: 6426 - DNA, 201 bp, Homo sapiens; identical to SEQ ID NO: 5914

SEQ ID NO: 6427 - DNA, 201 bp, Homo sapiens; identical to SEQ ID NO: 5915

SEQ ID NO: 6428 - DNA, 201 bp, Homo sapiens; identical to SEQ ID NO: 5916

SEQ ID NO: 6429 - DNA, 201 bp, Homo sapiens; identical to SEQ ID NO: 5917

SEQ ID NO: 6430 - DNA, 201 bp, Homo sapiens; identical to SEQ ID NO: 5919

SEQ ID NO: 6431 - DNA, 201 bp, Homo sapiens; identical to SEQ ID NO: 5918

SEQ ID NO: 6432 - DNA, 201 bp, Homo sapiens; identical to SEQ ID NO: 5920

SEQ ID NO: 6433 - DNA, 201 bp, Homo sapiens; identical to SEQ ID NO: 5921

SEQ ID NO: 6434 - DNA, 201 bp, Homo sapiens; identical to SEQ ID NO: 5922

SEQ ID NO: 6435 - DNA, 201 bp, Homo sapiens; identical to SEQ ID NO: 5923

SEQ ID NO: 6436 - DNA, 201 bp, Homo sapiens; identical to SEQ ID NO: 5924

SEQ ID NO: 6437 - DNA, 201 bp, Homo sapiens; identical to SEQ ID NO: 5925

SEQ ID NO: 6438 - DNA, 201 bp, Homo sapiens; identical to SEQ ID NO: 5927

SEQ ID NO: 6439 - DNA, 201 bp, Homo sapiens; identical to SEQ ID NO: 5926

SEQ ID NO: 6440 - DNA, 201 bp, Homo sapiens; identical to SEQ ID NO: 5928

SEQ ID NO: 6441 - DNA, 201 bp, Homo sapiens; identical to SEQ ID NO: 5929

SEQ ID NO: 6442 - DNA, 201 bp, Homo sapiens
ggtttcacccatcagagctctatgacgaccaccagaactcctgatacctccacaatgcacctggcaacctcgagaactccagcctccctgtctggacctaygacaggcctgaaaaggatgggacagccactggagtggatgccatctgcacccaccacccctgaccccaaaagccctaggctggacagagagcagctgtat

SEQ ID NO: 6443 - DNA, 201 bp, Homo sapiens; identical to SEQ ID NO: 5930

SEQ ID NO: 6444 - DNA, 201 bp, Homo sapiens
atggtttcacccatcagagctctatgacgaccaccagaactcctgatacctccacaatgcacctggcaacctcgagaactccagcctccctgtctggaccyacgacaggcctgaaaaggatgggacagccactggagtggatgccatctgcacccaccacccctgaccccaaaagccctaggctggacagagagcagctgt

SEQ ID NO: 6445 - DNA, 201 bp, Homo sapiens; identical to SEQ ID NO: 5931

SEQ ID NO: 6446 - DNA, 201 bp, Homo sapiens; identical to SEQ ID NO: 5933

SEQ ID NO: 6447 - DNA, 201 bp, Homo sapiens; identical to SEQ ID NO: 5932

SEQ ID NO: 6448 - DNA, 201 bp, Homo sapiens; identical to SEQ ID NO: 5935

SEQ ID NO: 6449 - DNA, 201 bp, Homo sapiens; identical to SEQ ID NO: 5936

SEQ ID NO: 6450 - DNA, 201 bp, Homo sapiens
ggacagtctctatgtcaatggtttcacacagcggagctctgtgcccaccacacagccactggccctgtcctgctgccattcaccctcaattttaccatcaytaacctgcagtatgaggaggacatgcatcgccctggctccaggaagttcaacaccacggagagggtccttcagggtctggcccttgttcaagaacaccag

SEQ ID NO: 6451 - DNA, 201 bp, Homo sapiens; identical to SEQ ID NO: 5937

SEQ ID NO: 6452 - DNA, 201 bp, Homo sapiens; identical to SEQ ID NO: 2605

SEQ ID NO: 6453 - DNA, 201 bp, Homo sapiens
acagcggagctctgtgcccaccacacagccactggccctgtcctgctgccattcaccctcaattttaccatcattaacctgcagtatgaggaggacatgcrtcgccctggctccaggaagttcaacaccacggagagggtccttcagggtctggcccttgttcaagaacaccagtgtcagctctctgtactctggttgcag

SEQ ID NO: 6454 - DNA, 201 bp, Homo sapiens; identical to SEQ ID NO: 5939

SEQ ID NO: 6455 - DNA, 201 bp, Homo sapiens; identical to SEQ ID NO: 5941

SEQ ID NO: 6456 - DNA, 201 bp, Homo sapiens; identical to SEQ ID NO: 5940

SEQ ID NO: 6457 - DNA, 201 bp, Homo sapiens; identical to SEQ ID NO: 5942

SEQ ID NO: 6458 - DNA, 201 bp, Homo sapiens; identical to SEQ ID NO: 5943

SEQ ID NO: 6459 - DNA, 201 bp, Homo sapiens; identical to SEQ ID NO: 5944

SEQ ID NO: 6460 - DNA, 201 bp, Homo sapiens; identical to SEQ ID NO: 5945

SEQ ID NO: 6461 - DNA, 201 bp, Homo sapiens; identical to SEQ ID NO: 5946

SEQ ID NO: 6462 - DNA, 201 bp, Homo sapiens; identical to SEQ ID NO: 5947

SEQ ID NO: 6463 - DNA, 201 bp, Homo sapiens; identical to SEQ ID NO: 5948

SEQ ID NO: 6464 - DNA, 201 bp, Homo sapiens; identical to SEQ ID NO: 5949

SEQ ID NO: 6465 - DNA, 201 bp, Homo sapiens; identical to SEQ ID NO: 5950

SEQ ID NO: 6466 - DNA, 201 bp, Homo sapiens; identical to SEQ ID NO: 5952

SEQ ID NO: 6467 - DNA, 201 bp, Homo sapiens; identical to SEQ ID NO: 5951

SEQ ID NO: 6468 - DNA, 201 bp, Homo sapiens; identical to SEQ ID NO: 5953

SEQ ID NO: 6469 - DNA, 201 bp, Homo sapiens; identical to SEQ ID NO: 6158

SEQ ID NO: 6470 - DNA, 201 bp, Homo sapiens; identical to SEQ ID NO: 5954

SEQ ID NO: 6471 - DNA, 201 bp, Homo sapiens; identical to SEQ ID NO: 5955

SEQ ID NO: 6472 - DNA, 201 bp, Homo sapiens; identical to SEQ ID NO: 5956

SEQ ID NO: 6473 - DNA, 201 bp, Homo sapiens; identical to SEQ ID NO: 5957

SEQ ID NO: 6474 - DNA, 201 bp, Homo sapiens; identical to SEQ ID NO: 5958

SEQ ID NO: 6475 - DNA, 201 bp, Homo sapiens; identical to SEQ ID NO: 5959

SEQ ID NO: 6476 - DNA, 201 bp, Homo sapiens; identical to SEQ ID NO: 5960

SEQ ID NO: 6477 - DNA, 201 bp, Homo sapiens; identical to SEQ ID NO: 6155

SEQ ID NO: 6478 - DNA, 201 bp, Homo sapiens; identical to SEQ ID NO: 6160

SEQ ID NO: 6479 - DNA, 201 bp, Homo sapiens; identical to SEQ ID NO: 5961

SEQ ID NO: 6480 - DNA, 201 bp, Homo sapiens; identical to SEQ ID NO: 5962

SEQ ID NO: 6481 - DNA, 201 bp, Homo sapiens; identical to SEQ ID NO: 5963

SEQ ID NO: 6482 - DNA, 201 bp, Homo sapiens; identical to SEQ ID NO: 5964

SEQ ID NO: 6483 - DNA, 201 bp, Homo sapiens; identical to SEQ ID NO: 5965

SEQ ID NO: 6484 - DNA, 201 bp, Homo sapiens; identical to SEQ ID NO: 5966

SEQ ID NO: 6485 - DNA, 201 bp, Homo sapiens; identical to SEQ ID NO: 5967

SEQ ID NO: 6486 - DNA, 201 bp, Homo sapiens; identical to SEQ ID NO: 5968

SEQ ID NO: 6487 - DNA, 201 bp, Homo sapiens; identical to SEQ ID NO: 5969

SEQ ID NO: 6488 - DNA, 201 bp, Homo sapiens; identical to SEQ ID NO: 5970

SEQ ID NO: 6489 - DNA, 201 bp, Homo sapiens; identical to SEQ ID NO: 5971

SEQ ID NO: 6490 - DNA, 201 bp, Homo sapiens; identical to SEQ ID NO: 5972

SEQ ID NO: 6491 - DNA, 201 bp, Homo sapiens; identical to SEQ ID NO: 5973

SEQ ID NO: 6492 - DNA, 201 bp, Homo sapiens; identical to SEQ ID NO: 5974

SEQ ID NO: 6493 - DNA, 201 bp, Homo sapiens; identical to SEQ ID NO: 5976

SEQ ID NO: 6494 - DNA, 201 bp, Homo sapiens; identical to SEQ ID NO: 5977

SEQ ID NO: 6495 - DNA, 201 bp, Homo sapiens; identical to SEQ ID NO: 5978

SEQ ID NO: 6496 - DNA, 201 bp, Homo sapiens; identical to SEQ ID NO: 5975

SEQ ID NO: 6497 - DNA, 201 bp, Homo sapiens; identical to SEQ ID NO: 5979

SEQ ID NO: 6498 - DNA, 201 bp, Homo sapiens; identical to SEQ ID NO: 5981

SEQ ID NO: 6499 - DNA, 201 bp, Homo sapiens; identical to SEQ ID NO: 5980

SEQ ID NO: 6500 - DNA, 201 bp, Homo sapiens; identical to SEQ ID NO: 6163

SEQ ID NO: 6501 - DNA, 201 bp, Homo sapiens; identical to SEQ ID NO: 5982

SEQ ID NO: 6502 - DNA, 201 bp, Homo sapiens; identical to SEQ ID NO: 5983

SEQ ID NO: 6503 - DNA, 201 bp, Homo sapiens; identical to SEQ ID NO: 5984

SEQ ID NO: 6504 - DNA, 201 bp, Homo sapiens; identical to SEQ ID NO: 5985

SEQ ID NO: 6505 - DNA, 201 bp, Homo sapiens; identical to SEQ ID NO: 5986

SEQ ID NO: 6506 - DNA, 201 bp, Homo sapiens; identical to SEQ ID NO: 5987

SEQ ID NO: 6507 - DNA, 201 bp, Homo sapiens; identical to SEQ ID NO: 5989

SEQ ID NO: 6508 - DNA, 201 bp, Homo sapiens; identical to SEQ ID NO: 5990

SEQ ID NO: 6509 - DNA, 201 bp, Homo sapiens; identical to SEQ ID NO: 5988

SEQ ID NO: 6510 - DNA, 201 bp, Homo sapiens; identical to SEQ ID NO: 5827

SEQ ID NO: 6511 - DNA, 201 bp, Homo sapiens; identical to SEQ ID NO: 5828

SEQ ID NO: 6512 - DNA, 201 bp, Homo sapiens; identical to SEQ ID NO: 5829

SEQ ID NO: 6513 - DNA, 201 bp, Homo sapiens; identical to SEQ ID NO: 5830

SEQ ID NO: 6514 - DNA, 201 bp, Homo sapiens; identical to SEQ ID NO: 5831

SEQ ID NO: 6515 - DNA, 201 bp, Homo sapiens; identical to SEQ ID NO: 5832

SEQ ID NO: 6516 - DNA, 201 bp, Homo sapiens; identical to SEQ ID NO: 5833

SEQ ID NO: 6517 - DNA, 201 bp, Homo sapiens; identical to SEQ ID NO: 5835

SEQ ID NO: 6518 - DNA, 201 bp, Homo sapiens; identical to SEQ ID NO: 5834

SEQ ID NO: 6519 - DNA, 201 bp, Homo sapiens; identical to SEQ ID NO: 5836

SEQ ID NO: 6520 - DNA, 201 bp, Homo sapiens; identical to SEQ ID NO: 5837

SEQ ID NO: 6521 - DNA, 201 bp, Homo sapiens; identical to SEQ ID NO: 5838

SEQ ID NO: 6522 - DNA, 201 bp, Homo sapiens; identical to SEQ ID NO: 5839

SEQ ID NO: 6523 - DNA, 201 bp, Homo sapiens; identical to SEQ ID NO: 5840

SEQ ID NO: 6524 - DNA, 201 bp, Homo sapiens; identical to SEQ ID NO: 5841

SEQ ID NO: 6525 - DNA, 201 bp, Homo sapiens; identical to SEQ ID NO: 5842

SEQ ID NO: 6526 - DNA, 201 bp, Homo sapiens; identical to SEQ ID NO: 5844

SEQ ID NO: 6527 - DNA, 201 bp, Homo sapiens; identical to SEQ ID NO: 5843

SEQ ID NO: 6528 - DNA, 201 bp, Homo sapiens; identical to SEQ ID NO: 5845

SEQ ID NO: 6529 - DNA, 201 bp, Homo sapiens; identical to SEQ ID NO: 5846

SEQ ID NO: 6530 - DNA, 201 bp, Homo sapiens; identical to SEQ ID NO: 5847

SEQ ID NO: 6531 - DNA, 201 bp, Homo sapiens; identical to SEQ ID NO: 5848

SEQ ID NO: 6532 - DNA, 201 bp, Homo sapiens; identical to SEQ ID NO: 5849

SEQ ID NO: 6533 - DNA, 201 bp, Homo sapiens; identical to SEQ ID NO: 5850

SEQ ID NO: 6534 - DNA, 201 bp, Homo sapiens; identical to SEQ ID NO: 5851

SEQ ID NO: 6535 - DNA, 201 bp, Homo sapiens; identical to SEQ ID NO: 5852

SEQ ID NO: 6536 - DNA, 201 bp, Homo sapiens; identical to SEQ ID NO: 5853

SEQ ID NO: 6537 - DNA, 201 bp, Homo sapiens; identical to SEQ ID NO: 6164

SEQ ID NO: 6538 - DNA, 201 bp, Homo sapiens; identical to SEQ ID NO: 5854

SEQ ID NO: 6539 - DNA, 201 bp, Homo sapiens; identical to SEQ ID NO: 5855

SEQ ID NO: 6540 - DNA, 201 bp, Homo sapiens; identical to SEQ ID NO: 5856

SEQ ID NO: 6541 - DNA, 201 bp, Homo sapiens; identical to SEQ ID NO: 5857

SEQ ID NO: 6542 - DNA, 201 bp, Homo sapiens; identical to SEQ ID NO: 5858

SEQ ID NO: 6543 - DNA, 201 bp, Homo sapiens; identical to SEQ ID NO: 5859

SEQ ID NO: 6544 - DNA, 201 bp, Homo sapiens; identical to SEQ ID NO: 5860

SEQ ID NO: 6545 - DNA, 201 bp, Homo sapiens
acaattcctgggacctctgcagtgcacctggaaacctctgggactccagcctccctccctggccacacactgctggccctctcctggtgccattcaccctmaacttcaccatcaccaacctgcagtatgaggaggacatgcatcgccctggatctaggaagttcaacgccacagagagggtcctgcagggtctgcttagtc

SEQ ID NO: 6546 - DNA, 201 bp, Homo sapiens; identical to SEQ ID NO: 5861

SEQ ID NO: 6547 - DNA, 201 bp, Homo sapiens
cactgctggccctctcctggtgccattcaccctaaacttcaccatcaccaacctgcagtatgaggaggacatgcatcgccctggatctaggaagttcaacrccacagagagggtcctgcagggtctgcttagtcccatattcaagaactccagtgttggccctctgtactctggctgcagactgacctatggggcagcaac

SEQ ID NO: 6548 - DNA, 201 bp, Homo sapiens; identical to SEQ ID NO: 5862

SEQ ID NO: 6549 - DNA, 201 bp, Homo sapiens; identical to SEQ ID NO: 5863

SEQ ID NO: 6550 - DNA, 201 bp, Homo sapiens
atggggcagccaccaaagtggatgccatctgcacctaccgccctgatcccaaaagccctggactggacagagagcagctatactgggagctgagccagctracccacagcatcactgagctgggcccctacaccctggacagggacagtctctatgtcaatgacagccactggccctgtcctgctgccattcaccctcaat

SEQ ID NO: 6551 - DNA, 201 bp, Homo sapiens; identical to SEQ ID NO: 5864

SEQ ID NO: 6552 - DNA, 201 bp, Homo sapiens
tcaccatcaccaacctgcagtatgaggaggacatgcatcgccctggatctaggaagttcaacgccacagagagggtcctgcagggtctgcttagtcccatwttcaagaactccagtgttggccctctgtactctggctgcagactgacctatggggcagcaactggaatggatgctgtctgcctctaccaccctaatccca

SEQ ID NO: 6553 - DNA, 201 bp, Homo sapiens; identical to SEQ ID NO: 5865

SEQ ID NO: 6554 - DNA, 201 bp, Homo sapiens; identical to SEQ ID NO: 5866

SEQ ID NO: 6555 - DNA, 201 bp, Homo sapiens; identical to SEQ ID NO: 5867

SEQ ID NO: 6556 - DNA, 201 bp, Homo sapiens; identical to SEQ ID NO: 5868

SEQ ID NO: 6557 - DNA, 201 bp, Homo sapiens; identical to SEQ ID NO: 5869

SEQ ID NO: 6558 - DNA, 201 bp, Homo sapiens; identical to SEQ ID NO: 5870

SEQ ID NO: 6559 - DNA, 201 bp, Homo sapiens; identical to SEQ ID NO: 5871

SEQ ID NO: 6560 - DNA, 201 bp, Homo sapiens; identical to SEQ ID NO: 5872

SEQ ID NO: 6561 - DNA, 201 bp, Homo sapiens; identical to SEQ ID NO: 5873

SEQ ID NO: 6562 - DNA, 201 bp, Homo sapiens; identical to SEQ ID NO: 5874

SEQ ID NO: 6563 - DNA, 201 bp, Homo sapiens; identical to SEQ ID NO: 5875

SEQ ID NO: 6564 - DNA, 201 bp, Homo sapiens; identical to SEQ ID NO: 5877

SEQ ID NO: 6565 - DNA, 201 bp, Homo sapiens; identical to SEQ ID NO: 5876

SEQ ID NO: 6566 - DNA, 201 bp, Homo sapiens; identical to SEQ ID NO: 5879

SEQ ID NO: 6567 - DNA, 201 bp, Homo sapiens; identical to SEQ ID NO: 5878

SEQ ID NO: 6568 - DNA, 201 bp, Homo sapiens; identical to SEQ ID NO: 5880

SEQ ID NO: 6569 - DNA, 201 bp, Homo sapiens; identical to SEQ ID NO: 5881

SEQ ID NO: 6570 - DNA, 201 bp, Homo sapiens; identical to SEQ ID NO: 5882

SEQ ID NO: 6571 - DNA, 201 bp, Homo sapiens; identical to SEQ ID NO: 5883

SEQ ID NO: 6572 - DNA, 201 bp, Homo sapiens; identical to SEQ ID NO: 5884

SEQ ID NO: 6573 - DNA, 201 bp, Homo sapiens; identical to SEQ ID NO: 6162

SEQ ID NO: 6574 - DNA, 201 bp, Homo sapiens; identical to SEQ ID NO: 6159

SEQ ID NO: 6575 - DNA, 201 bp, Homo sapiens; identical to SEQ ID NO: 5885

SEQ ID NO: 6576 - DNA, 201 bp, Homo sapiens; identical to SEQ ID NO: 5886

SEQ ID NO: 6577 - DNA, 201 bp, Homo sapiens; identical to SEQ ID NO: 6165

SEQ ID NO: 6578 - DNA, 201 bp, Homo sapiens; identical to SEQ ID NO: 6166

SEQ ID NO: 6579 - DNA, 201 bp, Homo sapiens; identical to SEQ ID NO: 5887

SEQ ID NO: 6580 - DNA, 201 bp, Homo sapiens; identical to SEQ ID NO: 5888

SEQ ID NO: 6581 - DNA, 201 bp, Homo sapiens; identical to SEQ ID NO: 5890

SEQ ID NO: 6582 - DNA, 201 bp, Homo sapiens; identical to SEQ ID NO: 5889

SEQ ID NO: 6583 - DNA, 201 bp, Homo sapiens; identical to SEQ ID NO: 5892

SEQ ID NO: 6584 - DNA, 201 bp, Homo sapiens; identical to SEQ ID NO: 5891

SEQ ID NO: 6585 - DNA, 201 bp, Homo sapiens; identical to SEQ ID NO: 5895

SEQ ID NO: 6586 - DNA, 201 bp, Homo sapiens; identical to SEQ ID NO: 2607

SEQ ID NO: 6587 - DNA, 201 bp, Homo sapiens; identical to SEQ ID NO: 5893

SEQ ID NO: 6588 - DNA, 201 bp, Homo sapiens; identical to SEQ ID NO: 5896

SEQ ID NO: 6589 - DNA, 201 bp, Homo sapiens; identical to SEQ ID NO: 5897

SEQ ID NO: 6590 - DNA, 201 bp, Homo sapiens; identical to SEQ ID NO: 5899

SEQ ID NO: 6591 - DNA, 201 bp, Homo sapiens; identical to SEQ ID NO: 5898

SEQ ID NO: 6592 - DNA, 201 bp, Homo sapiens; identical to SEQ ID NO: 5900

SEQ ID NO: 6593 - DNA, 201 bp, Homo sapiens; identical to SEQ ID NO: 5901

SEQ ID NO: 6594 - DNA, 201 bp, Homo sapiens; identical to SEQ ID NO: 5902

SEQ ID NO: 6595 - DNA, 201 bp, Homo sapiens; identical to SEQ ID NO: 5903

SEQ ID NO: 6596 - DNA, 201 bp, Homo sapiens; identical to SEQ ID NO: 5904

SEQ ID NO: 6597 - DNA, 201 bp, Homo sapiens; identical to SEQ ID NO: 5905

SEQ ID NO: 6598 - DNA, 201 bp, Homo sapiens; identical to SEQ ID NO: 5906

SEQ ID NO: 6599 - DNA, 201 bp, Homo sapiens; identical to SEQ ID NO: 5907

SEQ ID NO: 6600 - DNA, 201 bp, Homo sapiens; identical to SEQ ID NO: 5908

SEQ ID NO: 6601 - DNA, 201 bp, Homo sapiens; identical to SEQ ID NO: 5909

SEQ ID NO: 6602 - DNA, 201 bp, Homo sapiens; identical to SEQ ID NO: 5910

SEQ ID NO: 6603 - DNA, 201 bp, Homo sapiens; identical to SEQ ID NO: 5911

SEQ ID NO: 6604 - DNA, 201 bp, Homo sapiens; identical to SEQ ID NO: 5912

SEQ ID NO: 6605 - DNA, 201 bp, Homo sapiens; identical to SEQ ID NO: 5913

SEQ ID NO: 6606 - DNA, 201 bp, Homo sapiens; identical to SEQ ID NO: 5914

SEQ ID NO: 6607 - DNA, 201 bp, Homo sapiens; identical to SEQ ID NO: 5915

SEQ ID NO: 6608 - DNA, 201 bp, Homo sapiens; identical to SEQ ID NO: 5916

SEQ ID NO: 6609 - DNA, 201 bp, Homo sapiens; identical to SEQ ID NO: 5917

SEQ ID NO: 6610 - DNA, 201 bp, Homo sapiens; identical to SEQ ID NO: 5919

SEQ ID NO: 6611 - DNA, 201 bp, Homo sapiens; identical to SEQ ID NO: 5918

SEQ ID NO: 6612 - DNA, 201 bp, Homo sapiens; identical to SEQ ID NO: 5920

SEQ ID NO: 6613 - DNA, 201 bp, Homo sapiens; identical to SEQ ID NO: 5921

SEQ ID NO: 6614 - DNA, 201 bp, Homo sapiens; identical to SEQ ID NO: 5922

SEQ ID NO: 6615 - DNA, 201 bp, Homo sapiens; identical to SEQ ID NO: 5923

SEQ ID NO: 6616 - DNA, 201 bp, Homo sapiens; identical to SEQ ID NO: 5924

SEQ ID NO: 6617 - DNA, 201 bp, Homo sapiens; identical to SEQ ID NO: 5925

SEQ ID NO: 6618 - DNA, 201 bp, Homo sapiens; identical to SEQ ID NO: 5927

SEQ ID NO: 6619 - DNA, 201 bp, Homo sapiens; identical to SEQ ID NO: 5926

SEQ ID NO: 6620 - DNA, 201 bp, Homo sapiens; identical to SEQ ID NO: 5928

SEQ ID NO: 6621 - DNA, 201 bp, Homo sapiens; identical to SEQ ID NO: 5929

SEQ ID NO: 6622 - DNA, 201 bp, Homo sapiens; identical to SEQ ID NO: 6442

SEQ ID NO: 6623 - DNA, 201 bp, Homo sapiens; identical to SEQ ID NO: 5930

SEQ ID NO: 6624 - DNA, 201 bp, Homo sapiens; identical to SEQ ID NO: 6444

SEQ ID NO: 6625 - DNA, 201 bp, Homo sapiens; identical to SEQ ID NO: 5931

SEQ ID NO: 6626 - DNA, 201 bp, Homo sapiens; identical to SEQ ID NO: 5933

SEQ ID NO: 6627 - DNA, 201 bp, Homo sapiens; identical to SEQ ID NO: 5932

SEQ ID NO: 6628 - DNA, 201 bp, Homo sapiens; identical to SEQ ID NO: 5934

SEQ ID NO: 6629 - DNA, 201 bp, Homo sapiens; identical to SEQ ID NO: 5935

SEQ ID NO: 6630 - DNA, 201 bp, Homo sapiens; identical to SEQ ID NO: 5936

SEQ ID NO: 6631 - DNA, 201 bp, Homo sapiens
tcactgagctgggcccctacaccctggacagggacagtctctatgtcaatgacagccactggccctgtcctgctgccattcaccctcaattttaccatcaytaacctgcagtatgaggaggacatgcatcgccctggctccaggaagttcaacaccacggagagggtccttcagggtctgcttatgcccttgttcaagaac

SEQ ID NO: 6632 - DNA, 201 bp, Homo sapiens; identical to SEQ ID NO: 5937

SEQ ID NO: 6633 - DNA, 201 bp, Homo sapiens; identical to SEQ ID NO: 2605

SEQ ID NO: 6634 - DNA, 201 bp, Homo sapiens
acagggacagtctctatgtcaatgacagccactggccctgtcctgctgccattcaccctcaattttaccatcattaacctgcagtatgaggaggacatgcrtcgccctggctccaggaagttcaacaccacggagagggtccttcagggtctgcttatgcccttgttcaagaacaccagtgtcagctctctgtactctggt

SEQ ID NO: 6635 - DNA, 201 bp, Homo sapiens; identical to SEQ ID NO: 5939

SEQ ID NO: 6636 - DNA, 201 bp, Homo sapiens; identical to SEQ ID NO: 5941

SEQ ID NO: 6637 - DNA, 201 bp, Homo sapiens; identical to SEQ ID NO: 5940

SEQ ID NO: 6638 - DNA, 201 bp, Homo sapiens; identical to SEQ ID NO: 5942

SEQ ID NO: 6639 - DNA, 201 bp, Homo sapiens; identical to SEQ ID NO: 5943

SEQ ID NO: 6640 - DNA, 201 bp, Homo sapiens; identical to SEQ ID NO: 5944

SEQ ID NO: 6641 - DNA, 201 bp, Homo sapiens; identical to SEQ ID NO: 5945

SEQ ID NO: 6642 - DNA, 201 bp, Homo sapiens; identical to SEQ ID NO: 5946

SEQ ID NO: 6643 - DNA, 201 bp, Homo sapiens; identical to SEQ ID NO: 5947

SEQ ID NO: 6644 - DNA, 201 bp, Homo sapiens; identical to SEQ ID NO: 5948

SEQ ID NO: 6645 - DNA, 201 bp, Homo sapiens; identical to SEQ ID NO: 5949

SEQ ID NO: 6646 - DNA, 201 bp, Homo sapiens; identical to SEQ ID NO: 5950

SEQ ID NO: 6647 - DNA, 201 bp, Homo sapiens; identical to SEQ ID NO: 5952

SEQ ID NO: 6648 - DNA, 201 bp, Homo sapiens; identical to SEQ ID NO: 5951

SEQ ID NO: 6649 - DNA, 201 bp, Homo sapiens; identical to SEQ ID NO: 5953

SEQ ID NO: 6650 - DNA, 201 bp, Homo sapiens; identical to SEQ ID NO: 6158

SEQ ID NO: 6651 - DNA, 201 bp, Homo sapiens; identical to SEQ ID NO: 5955

SEQ ID NO: 6652 - DNA, 201 bp, Homo sapiens; identical to SEQ ID NO: 5954

SEQ ID NO: 6653 - DNA, 201 bp, Homo sapiens; identical to SEQ ID NO: 5956

SEQ ID NO: 6654 - DNA, 201 bp, Homo sapiens; identical to SEQ ID NO: 5957

SEQ ID NO: 6655 - DNA, 201 bp, Homo sapiens; identical to SEQ ID NO: 5958

SEQ ID NO: 6656 - DNA, 201 bp, Homo sapiens; identical to SEQ ID NO: 5959

SEQ ID NO: 6657 - DNA, 201 bp, Homo sapiens; identical to SEQ ID NO: 5960

SEQ ID NO: 6658 - DNA, 201 bp, Homo sapiens; identical to SEQ ID NO: 6155

SEQ ID NO: 6659 - DNA, 201 bp, Homo sapiens; identical to SEQ ID NO: 6160

SEQ ID NO: 6660 - DNA, 201 bp, Homo sapiens; identical to SEQ ID NO: 5961

SEQ ID NO: 6661 - DNA, 201 bp, Homo sapiens; identical to SEQ ID NO: 5962

SEQ ID NO: 6662 - DNA, 201 bp, Homo sapiens; identical to SEQ ID NO: 5963

SEQ ID NO: 6663 - DNA, 201 bp, Homo sapiens; identical to SEQ ID NO: 5964

SEQ ID NO: 6664 - DNA, 201 bp, Homo sapiens; identical to SEQ ID NO: 5965

SEQ ID NO: 6665 - DNA, 201 bp, Homo sapiens; identical to SEQ ID NO: 5966

SEQ ID NO: 6666 - DNA, 201 bp, Homo sapiens; identical to SEQ ID NO: 5967

SEQ ID NO: 6667 - DNA, 201 bp, Homo sapiens; identical to SEQ ID NO: 5968

SEQ ID NO: 6668 - DNA, 201 bp, Homo sapiens; identical to SEQ ID NO: 5969

SEQ ID NO: 6669 - DNA, 201 bp, Homo sapiens; identical to SEQ ID NO: 5970

SEQ ID NO: 6670 - DNA, 201 bp, Homo sapiens; identical to SEQ ID NO: 5971

SEQ ID NO: 6671 - DNA, 201 bp, Homo sapiens; identical to SEQ ID NO: 5972

SEQ ID NO: 6672 - DNA, 201 bp, Homo sapiens; identical to SEQ ID NO: 5973

SEQ ID NO: 6673 - DNA, 201 bp, Homo sapiens; identical to SEQ ID NO: 5974

SEQ ID NO: 6674 - DNA, 201 bp, Homo sapiens; identical to SEQ ID NO: 5976

SEQ ID NO: 6675 - DNA, 201 bp, Homo sapiens; identical to SEQ ID NO: 5977

SEQ ID NO: 6676 - DNA, 201 bp, Homo sapiens; identical to SEQ ID NO: 5978

SEQ ID NO: 6677 - DNA, 201 bp, Homo sapiens; identical to SEQ ID NO: 5975

SEQ ID NO: 6678 - DNA, 201 bp, Homo sapiens; identical to SEQ ID NO: 5979

SEQ ID NO: 6679 - DNA, 201 bp, Homo sapiens; identical to SEQ ID NO: 5981

SEQ ID NO: 6680 - DNA, 201 bp, Homo sapiens; identical to SEQ ID NO: 5980

SEQ ID NO: 6681 - DNA, 201 bp, Homo sapiens; identical to SEQ ID NO: 6163

SEQ ID NO: 6682 - DNA, 201 bp, Homo sapiens; identical to SEQ ID NO: 5982

SEQ ID NO: 6683 - DNA, 201 bp, Homo sapiens; identical to SEQ ID NO: 5983

SEQ ID NO: 6684 - DNA, 201 bp, Homo sapiens; identical to SEQ ID NO: 5984

SEQ ID NO: 6685 - DNA, 201 bp, Homo sapiens; identical to SEQ ID NO: 5985

SEQ ID NO: 6686 - DNA, 201 bp, Homo sapiens; identical to SEQ ID NO: 5986

SEQ ID NO: 6687 - DNA, 201 bp, Homo sapiens; identical to SEQ ID NO: 5987

SEQ ID NO: 6688 - DNA, 201 bp, Homo sapiens; identical to SEQ ID NO: 5989

SEQ ID NO: 6689 - DNA, 201 bp, Homo sapiens; identical to SEQ ID NO: 5990

SEQ ID NO: 6690 - DNA, 201 bp, Homo sapiens; identical to SEQ ID NO: 5988

SEQ ID NO: 6691 - DNA, 201 bp, Homo sapiens; identical to SEQ ID NO: 6155

SEQ ID NO: 6692 - DNA, 201 bp, Homo sapiens; identical to SEQ ID NO: 6156

SEQ ID NO: 6693 - DNA, 201 bp, Homo sapiens; identical to SEQ ID NO: 6157

SEQ ID NO: 6694 - DNA, 201 bp, Homo sapiens; identical to SEQ ID NO: 6158

SEQ ID NO: 6695 - DNA, 201 bp, Homo sapiens; identical to SEQ ID NO: 6159

SEQ ID NO: 6696 - DNA, 201 bp, Homo sapiens; identical to SEQ ID NO: 6160

SEQ ID NO: 6697 - DNA, 201 bp, Homo sapiens; identical to SEQ ID NO: 6161

SEQ ID NO: 6698 - DNA, 201 bp, Homo sapiens; identical to SEQ ID NO: 6162

SEQ ID NO: 6699 - DNA, 201 bp, Homo sapiens; identical to SEQ ID NO: 6163

SEQ ID NO: 6700 - DNA, 201 bp, Homo sapiens; identical to SEQ ID NO: 6164

SEQ ID NO: 6701 - DNA, 201 bp, Homo sapiens; identical to SEQ ID NO: 6165

SEQ ID NO: 6702 - DNA, 201 bp, Homo sapiens; identical to SEQ ID NO: 6166

SEQ ID NO: 6703 - DNA, 201 bp, Homo sapiens
ctttttgtgtgcgtgatctaggggaggagacaccccagagctccaactagctctcagctgaattctacttttgtttttatgtcttcctcgcctcctctcgygtccctcttatctgactgatctgcgaagtctgatgcttctgccagagggagaggaataaatagatgttgctgcttccgaaggcttagacgttgggaaaga

SEQ ID NO: 6704 - DNA, 201 bp, Homo sapiens
gttttctatttcactaatcatgagaaaaactgttcttttgcaataataataaattaaacatgctgttaccagagcctctttgctggagtctccagatgttwatttactttctgcaccccaattgggaatgcaatattggatgaaaagagaggtttctggtattcacagaaagctagatatgccttaaaacatactctgccg

SEQ ID NO: 6705 - DNA, 201 bp, Homo sapiens
taacggaaactgtagaggggcaagcagtgaacgctgtaaatgtaagcctattagagctacacagaagacctatttccggaacaattacaactatgtcattygggctaaagttaaagagataaagactaagtgccatgatgtgactgcagtagtggaggtgaaggagattctaaagtcctctctggtaaacattccacggga

SEQ ID NO: 6706 - DNA, 201 bp, Homo sapiens
atgaattatttttgagactgtcaggaagtaaaataaataggagcttaagaaagaacattttgcctgattgagaagcacaactgaaaccagtagccgctggkgtgttaatggtagcattcttcttttggcaatacatttgatttgttcatgaatatattaatcagcattagagaaatgaattataactagacatctgctgtt

SEQ ID NO: 6707 - DNA, 201 bp, Homo sapiens
ctcctgagcgtccctcctgccagccagggtcgcagccgcagcggcggccgcagctcttagcccacacaggacttgtaaactcttactgcacccttctctccattaggagcttttcctccctccttccccccaacccctctgtcctcctcactttggggaatttaatgctttctttagcatctttttgtgtgcgtgatctag

SEQ ID NO: 6708 - DNA, 201 bp, Homo sapiens
tatgaagcttcgtcatcttggactcagtaaaagtgattctagcaatagtgattccactcagagtcagaagtctggcaggaactcgaacccccggcaagcasgcaactaaatcccgaaatacaaaaagtaacacagtggacttcctattaagacttacttgcattgctggactagcaaaggaaaattgcactattgcacatc

SEQ ID NO: 6709 - DNA, 201 bp, Homo sapiens
atgttaatgaggaatatatcatcatgggctatgaagatgaggaacgttccagattactcttggtggaaggctctatagctgagaagtggaaggatcgactyggtaaaaaagttaagcgctgggatatgaagcttcgtcatcttggactcagtaaaagtgattctagcaatagtgattccactcagagtcagaagtctggca

SEQ ID NO: 6710 - DNA, 201 bp, Homo sapiens
aaaaatcatgtgataactgattattacttctgtttctcttttggtttctgcttctctcttctctcaacccctttgtaatggtttgggggcagactcttaartatattgtgagttttctatttcactaatcatgagaaaaactgttcttttgcaataataataaattaaacatgctgttaccagagcctctttgctggagtc

SEQ ID NO: 6711 - DNA, 201 bp, Homo sapiens
ttgggaaagagcagcctgggcggcaggggcggtggctggagctcggtaaagctcgtgggaccccattgggggaatttgatccaaggaagcggtgattgccrggggaggagaagctcccagatccttgtgtccacttgcagcgggggaggcggagacggcggagcgggccttttggcgtccactgcgcggctgcaccctgcc

SEQ ID NO: 6712 - DNA, 201 bp, Homo sapiens
tcctgccgggatcatggtctgcggcagcccgggagggatgctgctgctgcgggccgggctgcttgccctggctgctctctgcctgctccgggtgcccgggkctcgggctgcagcctgtgagcccgtccgcatccccctgtgcaagtccctgccctggaacatgactaagatgcccaaccacctgcaccacagcactcaggc

SEQ ID NO: 6713 - DNA, 201 bp, Homo sapiens; identical to SEQ ID NO: 6704

SEQ ID NO: 6714 - DNA, 201 bp, Homo sapiens; identical to SEQ ID NO: 6705

SEQ ID NO: 6715 - DNA, 201 bp, Homo sapiens; identical to SEQ ID NO: 6706

SEQ ID NO: 6716 - DNA, 201 bp, Homo sapiens; identical to SEQ ID NO: 6708

SEQ ID NO: 6717 - DNA, 201 bp, Homo sapiens; identical to SEQ ID NO: 6709

SEQ ID NO: 6718 - DNA, 201 bp, Homo sapiens; identical to SEQ ID NO: 6710

SEQ ID NO: 6719 - DNA, 201 bp, Homo sapiens; identical to SEQ ID NO: 6711

SEQ ID NO: 6720 - DNA, 201 bp, Homo sapiens; identical to SEQ ID NO: 6712

SEQ ID NO: 6721 - DNA, 201 bp, Homo sapiens
gcctccgcagccgatcacatgaaggtggtgccaagtctcctgctctccgtcctcctggcacaggtgtggctggtacccggcttggcccccagtcctcagtygccagagaccccagcccctcagaaccagaccagcagggtagtgcaggctcccaaggaggaagaggaagatgagcaggaggccagcgaggagaaggccagt

SEQ ID NO: 6722 - DNA, 201 bp, Homo sapiens
aagagagggctccacttgcaggccctgaagcccaccaagcccgggctcctgccttccctctttaagggactcagagagaccctctcccgcaacctggaacwgggcctcacacaggggagttttgccttcatccacaaggattttgatgtcaaagagactttcttcaatttatccaagaggtattttgatacagagtgcgtg

SEQ ID NO: 6723 - DNA, 201 bp, Homo sapiens
ggagcacccaggaattactgggctaccactgcagactgcaggacaagctccaagaacaggaaggaagtcttgcagctgaagggaggcactccttggcctcsgcagccgatcacatgaaggtggtgccaagtctcctgctctccgtcctcctggcacaggtgtggctggtacccggcttggcccccagtcctcagtcgccag

SEQ ID NO: 6724 - DNA, 201 bp, Homo sapiens
gctccacttgcaggccctgaagcccaccaagcccgggctcctgccttccctctttaagggactcagagagaccctctcccgcaacctggaactgggcctcwcacaggggagttttgccttcatccacaaggattttgatgtcaaagagactttcttcaatttatccaagaggtattttgatacagagtgcgtgcctatgaa

SEQ ID NO: 6725 - DNA, 201 bp, Homo sapiens
ctgtttgatgagattaatcctgaaaccaaattaattcttgtggattacatcttgttcaaagggaaatggttgaccccatttgaccctgtcttcaccgaagycgacactttccacctggacaagtacaagaccattaaggtgcccatgatgtacggtgcaggcaagtttgcctccacctttgacaagaattttcgttgtcat

SEQ ID NO: 6726 - DNA, 201 bp, Homo sapiens
accttagtgaactctcagctactggaagaaatctccaagtatccagggttttacaaagaacagtgattgaagttgatgaaaggggcactgaggcagtggcrggaatcttgtcagaaattactgcttattccatgcctcctgtcatcaaagtggaccggccatttcatttcatgatctatgaagaaacctctggaatgcttc

SEQ ID NO: 6727 - DNA, 201 bp, Homo sapiens
tttcctacacatacatacctatgataaagtttaatttataaattaggcacagtaagagattaacaataataacaacattaagtaaaatgagttacttgaaygcaagcactgcaataccataacagtcaaactgattatagagaaggctactaagtgactcatgggcgaggagcatagacagtgtggagacattgggcaagg

SEQ ID NO: 6728 - DNA, 201 bp, Homo sapiens
agtggcaggtgagctggtgattccttactgcccaggttctgtctaggaaggtgcgtcctcaccatgctggatggtgtcctagtccaggagcaccccctgarctcctggcctagactccaaagggttgggtagatgagcaaagactttacaaagaccttaggcgatatatgtccaggagcacccaggaattactgggctacc

SEQ ID NO: 6729 - DNA, 201 bp, Homo sapiens
cagggctgagaagtggcaggtgagctggtgattccttactgcccaggttctgtctaggaaggtgcgtcctcaccatgctggatggtgtcctagtccaggakcaccccctgagctcctggcctagactccaaagggttgggtagatgagcaaagactttacaaagaccttaggcgatatatgtccaggagcacccaggaatt

SEQ ID NO: 6730 - DNA, 201 bp, Homo sapiens
agtggaccggccatttcatttcatgatctatgaagaaacctctggaatgcttctgtttctgggcagggtggtgaatccgactctcctataattcaggacaygcataagcacttcgtgctgtagtagatgctgaatctgaggtatcaaacacacacaggataccagcaatggatggcaggggagagtgttccttttgttctt

SEQ ID NO: 6731 - DNA, 201 bp, Homo sapiens
atagagaaggctactaagtgactcatgggcgaggagcatagacagtgtggagacattgggcaaggggagaattcacatcctgggtgggacagagcaggacratgcaagattccatcccactactcagaatggcatgctgcttaagacttttagattgtttatttctggaatttttcatttaatgtttttggaccatggttg

SEQ ID NO: 6732 - DNA, 201 bp, Homo sapiens
gggggaaaattcccaaactgtttgatgagattaatcctgaaaccaaattaattcttgtggattacatcttgttcaaagggaaatggttgaccccatttgaycctgtcttcaccgaagtcgacactttccacctggacaagtacaagaccattaaggtgcccatgatgtacggtgcaggcaagtttgcctccacctttgaca

SEQ ID NO: 6733 - DNA, 120 bp, Homo sapiens
ctggagtggggtaagaggcraattatagacacaaggggctcctctgcaggaaggaggccaagggaaagaggcttgaaaggcttgatatttcacccaccaccactcactgccggagtaagc

SEQ ID NO: 6734 - DNA, 201 bp, Homo sapiens
tgttcaaagggaaatggttgaccccatttgaccctgtcttcaccgaagtcgacactttccacctggacaagtacaagaccattaaggtgcccatgatgtayggtgcaggcaagtttgcctccacctttgacaagaattttcgttgtcatgtcctcaaactgccctaccaaggaaatgccaccatgctggtggtcctcatgg

SEQ ID NO: 6735 - DNA, 201 bp, Homo sapiens
gtcgccagagaccccagcccctcagaaccagaccagcagggtagtgcaggctcccaaggaggaagaggaagatgagcaggaggccagcgaggagaaggccrgtgaggaagagaaagcctggctgatggccagcaggcagcagcttgccaaggagacttcaaacttcggattcagcctgctgcgaaagatctccatgaggca

SEQ ID NO: 6736 - DNA, 201 bp, Homo sapiens
gggagttttgccttcatccacaaggattttgatgtcaaagagactttcttcaatttatccaagaggtattttgatacagagtgcgtgcctatgaattttcrcaatgcctcacaggccaaaaggctcatgaatcattacattaacaaagagactcgggggaaaattcccaaactgtttgatgagattaatcctgaaaccaaa

SEQ ID NO: 6737 - DNA, 201 bp, Homo sapiens
gttcaaagggaaatggttgaccccatttgaccctgtcttcaccgaagtcgacactttccacctggacaagtacaagaccattaaggtgcccatgatgtacrgtgcaggcaagtttgcctccacctttgacaagaattttcgttgtcatgtcctcaaactgccctaccaaggaaatgccaccatgctggtggtcctcatgga

SEQ ID NO: 6738 - DNA, 201 bp, Homo sapiens
ctggcacaggtgtggctggtacccggcttggcccccagtcctcagtcgccagagaccccagcccctcagaaccagaccagcagggtagtgcaggctcccarggaggaagaggaagatgagcaggaggccagcgaggagaaggccagtgaggaagagaaagcctggctgatggccagcaggcagcagcttgccaaggagact

SEQ ID NO: 6739 - DNA, 201 bp, Homo sapiens
ctgcttaggcagatgggaatcagaagaatcttctcaccctttgctgaccttagtgaactctcagctactggaagaaatctccaagtatccagggttttacraagaacagtgattgaagttgatgaaaggggcactgaggcagtggcaggaatcttgtcagaaattactgcttattccatgcctcctgtcatcaaagtggac

SEQ ID NO: 6740 - DNA, 201 bp, Homo sapiens
cagactgcaggacaagctccaagaacaggaaggaagtcttgcagctgaagggaggcactccttggcctccgcagccgatcacatgaaggtggtgccaagtmtcctgctctccgtcctcctggcacaggtgtggctggtacccggcttggcccccagtcctcagtcgccagagaccccagcccctcagaaccagaccagcag

SEQ ID NO: 6741 - DNA, 201 bp, Homo sapiens
agctgaagggaggcactccttggcctccgcagccgatcacatgaaggtggtgccaagtctcctgctctccgtcctcctggcacaggtgtggctggtacccrgcttggcccccagtcctcagtcgccagagaccccagcccctcagaaccagaccagcagggtagtgcaggctcccaaggaggaagaggaagatgagcagga

SEQ ID NO: 6742 - DNA, 201 bp, Homo sapiens; identical to SEQ ID NO: 6721

SEQ ID NO: 6743 - DNA, 201 bp, Homo sapiens; identical to SEQ ID NO: 6722

SEQ ID NO: 6744 - DNA, 201 bp, Homo sapiens
aagctgaagctttggtttctgctctaaatgaaggacttttccaggacccaaggccacacactggaagtcttgcagctgaagggaggcactccttggcctcsgcagccgatcacatgaaggtggtgccaagtctcctgctctccgtcctcctggcacaggtgtggctggtacccggcttggcccccagtcctcagtcgccag

SEQ ID NO: 6745 - DNA, 201 bp, Homo sapiens; identical to SEQ ID NO: 6724

SEQ ID NO: 6746 - DNA, 201 bp, Homo sapiens; identical to SEQ ID NO: 6725

SEQ ID NO: 6747 - DNA, 201 bp, Homo sapiens; identical to SEQ ID NO: 6726

SEQ ID NO: 6748 - DNA, 201 bp, Homo sapiens; identical to SEQ ID NO: 6727

SEQ ID NO: 6749 - DNA, 201 bp, Homo sapiens; identical to SEQ ID NO: 6730

SEQ ID NO: 6750 - DNA, 201 bp, Homo sapiens; identical to SEQ ID NO: 6731

SEQ ID NO: 6751 - DNA, 201 bp, Homo sapiens; identical to SEQ ID NO: 6732

SEQ ID NO: 6752 - DNA, 201 bp, Homo sapiens; identical to SEQ ID NO: 6734

SEQ ID NO: 6753 - DNA, 201 bp, Homo sapiens; identical to SEQ ID NO: 6735

SEQ ID NO: 6754 - DNA, 201 bp, Homo sapiens; identical to SEQ ID NO: 6736

SEQ ID NO: 6755 - DNA, 201 bp, Homo sapiens; identical to SEQ ID NO: 6737

SEQ ID NO: 6756 - DNA, 201 bp, Homo sapiens; identical to SEQ ID NO: 6738

SEQ ID NO: 6757 - DNA, 201 bp, Homo sapiens; identical to SEQ ID NO: 6739

SEQ ID NO: 6758 - DNA, 201 bp, Homo sapiens
aggacttttccaggacccaaggccacacactggaagtcttgcagctgaagggaggcactccttggcctccgcagccgatcacatgaaggtggtgccaagtmtcctgctctccgtcctcctggcacaggtgtggctggtacccggcttggcccccagtcctcagtcgccagagaccccagcccctcagaaccagaccagcag

SEQ ID NO: 6759 - DNA, 201 bp, Homo sapiens; identical to SEQ ID NO: 6741

SEQ ID NO: 6760 - DNA, 201 bp, Homo sapiens; identical to SEQ ID NO: 6726

SEQ ID NO: 6761 - DNA, 201 bp, Homo sapiens; identical to SEQ ID NO: 6730

SEQ ID NO: 6762 - DNA, 201 bp, Homo sapiens; identical to SEQ ID NO: 6731

SEQ ID NO: 6763 - DNA, 201 bp, Homo sapiens; identical to SEQ ID NO: 6721

SEQ ID NO: 6764 - DNA, 201 bp, Homo sapiens; identical to SEQ ID NO: 6732

SEQ ID NO: 6765 - DNA, 201 bp, Homo sapiens; identical to SEQ ID NO: 6735

SEQ ID NO: 6766 - DNA, 201 bp, Homo sapiens; identical to SEQ ID NO: 6734

SEQ ID NO: 6767 - DNA, 201 bp, Homo sapiens; identical to SEQ ID NO: 6736

SEQ ID NO: 6768 - DNA, 201 bp, Homo sapiens; identical to SEQ ID NO: 6738

SEQ ID NO: 6769 - DNA, 201 bp, Homo sapiens; identical to SEQ ID NO: 6737

SEQ ID NO: 6770 - DNA, 201 bp, Homo sapiens; identical to SEQ ID NO: 6722

SEQ ID NO: 6771 - DNA, 201 bp, Homo sapiens; identical to SEQ ID NO: 6739

SEQ ID NO: 6772 - DNA, 201 bp, Homo sapiens; identical to SEQ ID NO: 6744

SEQ ID NO: 6773 - DNA, 201 bp, Homo sapiens; identical to SEQ ID NO: 6724

SEQ ID NO: 6774 - DNA, 201 bp, Homo sapiens; identical to SEQ ID NO: 6758

SEQ ID NO: 6775 - DNA, 201 bp, Homo sapiens; identical to SEQ ID NO: 6725

SEQ ID NO: 6776 - DNA, 201 bp, Homo sapiens; identical to SEQ ID NO: 6741

SEQ ID NO: 6777 - DNA, 201 bp, Homo sapiens
cttggataaaatgttggtggatgatactggtgatgtaaccattactaatgatggtgcaaccatcctgaagttactggaggtagaacatcctgcagctaatkttctttgtgagctggctgatctgcaagacaaagaagttagagatggaactacctcagtggttattattgcagcagaactcctaaaaaatgcagattaatt

SEQ ID NO: 6778 - DNA, 201 bp, Homo sapiens
atttcaaagctggataaatcattaaaacacgaactggaatcaaaacagatttgtttagataaaagtgaaacaaaatttcccaatcacaaagaaacagatgrttgcgatgcagctaacatatgttgtcattctgttgggagtgataatgtaaattcaaaattttatagcaccacagccctaaaatacatggtttcaaatcca

SEQ ID NO: 6779 - DNA, 201 bp, Homo sapiens
aaagtttaaaaggtcagttttactttcagtcgatgaatgtgaagagctgggatcagatgaaggagaagtccatactccctttcaggcttctgtagattctktttcaccttctgatgtttttgatggcatttctcatgaacatcatggaaggacctgctattccagattctcacgagaaagtgaagataatattttagaatg

SEQ ID NO: 6780 - DNA, 201 bp, Homo sapiens
aacaagcacctaagagaaaaatggtcaagcaagtacacacagctttgcctaaggttaatgcaaaaatagtggcaatgcctaaaaatctaaatcagtcaaaraaaggtgaaactttgaataataaagattcaaaacagaaaatgcctcctggacaggttatatcaaaaactcagccttcctcccaaagacctttaaaacatg

SEQ ID NO: 6781 - DNA, 201 bp, Homo sapiens
gaatctgctatggatgaagacaaacatgctacagcagactcagatgtatcttccaagtgtttttcgggacagctatcagaaaaaaattctcctaaaaatayggaaacatcagaatctccagagagccatgaaactccagaaactccatttgtgggtcactggaatttgagtactggtgttctgcatcagcgagagagtcct

SEQ ID NO: 6782 - DNA, 201 bp, Homo sapiens
ttaatcttgcatctgaaataagtgatgcagaagcactccagtcatcctgcaggcctgacccacaaaagccattaaacgatcaagaaaaagagaagttggcrttagaatgccaaaatatttcaaagctggataaatcattaaaacacgaactggaatcaaaacagatttgtttagataaaagtgaaacaaaatttcccaatc

SEQ ID NO: 6783 - DNA, 201 bp, Homo sapiens
ctccaatatatgagatggatgtaatagaagcatttgagcagaaagtggaatcagaaacacatgttacagatatggattttgaagatgaccaacattttgcraaacaagattggacactactaaagcaactgctctctgaacaggattcaaacttagatgttacaaattccgttcctgaagacttaagtttagcacagtatc

SEQ ID NO: 6784 - DNA, 201 bp, Homo sapiens
ccttcctcccaaagacctttaaaacatgaaacatctactgtccaaaaaagtatgtttcatgatgtgcgtgataataacaacaaggacagtgtttctgaacrgaagcctcacaaacctctcattaatcttgcatctgaaataagtgatgcagaagcactccagtcatcctgcaggcctgacccacaaaagccattaaacgat

SEQ ID NO: 6785 - DNA, 201 bp, Homo sapiens
atgaaaaacagtgtagatagtgtcaaaaattccactgtagccataaaatctcgacctgtttcaagagttaccaatggaacttccaataaaaaaagtattcrtgaacaagacactaatgtaaataacagtgtactaaagaaagtcagtggcaaaggatgtagtgagccagtaccacaggcaattttgaagaaaagaggaact

SEQ ID NO: 6786 - DNA, 201 bp, Homo sapiens
ggctagtttttcctctgaagattgttcgcctcaaggcgagtggacaattctggaactggaaactcagcattaagtgttaacattttggaaaaatttatgcyactcctttattttttgatgcctatattatatccaaatgataattgcattagccggatataaactttctttaatattgagtctttccaatttaatgaggta

SEQ ID NO: 6787 - DNA, 201 bp, Homo sapiens
tcaagagttaccaatggaacttccaataaaaaaagtattcatgaacaagacactaatgtaaataacagtgtactaaagaaagtcagtggcaaaggatgtaktgagccagtaccacaggcaattttgaagaaaagaggaactagcaatggatgtactgcagctcagcagaggacaaagagtaccccatctaatcttactaaa

SEQ ID NO: 6788 - DNA, 201 bp, Homo sapiens
ttgcgatgcagctaacatatgttgtcattctgttgggagtgataatgtaaattcaaaattttatagcaccacagccctaaaatacatggtttcaaatccawatgaaaactccttgaactctaatccagtttgtgatttagactcaacaagtgcagggcaaatccatttgatatcagatagggagaaccaagtagggagaaa

SEQ ID NO: 6789 - DNA, 201 bp, Homo sapiens
atcttcagtctcttcaaggcagtctgatgaaaatgtggcaaagttggaccacaatacaactacagagaaacaagcacctaagagaaaaatggtcaagcaastacacacagctttgcctaaggttaatgcaaaaatagtggcaatgcctaaaaatctaaatcagtcaaagaaaggtgaaactttgaataataaagattcaaa

SEQ ID NO: 6790 - DNA, 201 bp, Homo sapiens
atgtaaaaatgaaagcactgtcttggatcttagtagcattgactcttcaagaaaaaataaacagagtgtttcagccacagaaaaaaagaacacaatagacrtcctatccagtagaagcagacagcttcttcgagaagataaaaaagtaaacaatggaagcaatgtggaaaatgacattcagcaacgcagcaaattcttgga

SEQ ID NO: 6791 - DNA, 201 bp, Homo sapiens
cacagccctaaaatacatggtttcaaatccaaatgaaaactccttgaactctaatccagtttgtgatttagactcaacaagtgcagggcaaatccatttgrtatcagatagggagaaccaagtagggagaaaagatacaaacaaacaatcaagtattaaatgtgtggaagatgtttcactgtgtaatcctgaaaggacaaa

SEQ ID NO: 6792 - DNA, 201 bp, Homo sapiens
tcctagtaagttgtcagatgaatctgctatggatgaagacaaacatgctacagcagactcagatgtatcttccaagtgtttttcgggacagctatcagaaraaaattctcctaaaaatatggaaacatcagaatctccagagagccatgaaactccagaaactccatttgtgggtcactggaatttgagtactggtgttct

SEQ ID NO: 6793 - DNA, 201 bp, Homo sapiens
aaacagaaaatgcctcctggacaggttatatcaaaaactcagccttcctcccaaagacctttaaaacatgaaacatctactgtccaaaaaagtatgtttcrtgatgtgcgtgataataacaacaaggacagtgtttctgaacagaagcctcacaaacctctcattaatcttgcatctgaaataagtgatgcagaagcactc

SEQ ID NO: 6794 - DNA, 201 bp, Homo sapiens
gattttcttggaagaagtagcagtgataccagtactcctgaagaattaaaaatttatgatagtaatttaagaattgaagtaaaaatgaaaaagcaaagtartaatgatcttttccaagttaattcaacgagtgatgatgaaatccctaggaaaaggccagaaatttggtctcgatctgcaatagttcactctagggaaaga

SEQ ID NO: 6795 - DNA, 201 bp, Homo sapiens
  misc_feature (101)..(101): n is a, c, g, or t
aatttctctatatctaacccagctcctcagcagtttcagggaataattaatttagcttttgaagatgcaactgaaaatgaatgtcgtgaattttctgcaantaaaaagtttaaaaggtcagttttactttcagtcgatgaatgtgaagagctgggatcagatgaaggagaagtccatactccctttcaggcttctgtagat

SEQ ID NO: 6796 - DNA, 201 bp, Homo sapiens
cctcttccctgggcctgtttctcgctgtccctgtcttttatccttctcatctgcctcttttttgctcaccctgtttctcactgccctcccctccgcctttytcacccctctgtccttttgagctcttttttgctctgtctcttcatttgccttttgcactctcaaactctttcatcttcccattcgctgtctgtatttctc

SEQ ID NO: 6797 - DNA, 201 bp, Homo sapiens
caccctgtttctcactgccctcccctccgcctttctcacccctctgtccttttgagctcttttttgctctgtctcttcatttgccttttgcactctcaaamtctttcatcttcccattcgctgtctgtatttctccataactatatctttcttcctctgtctccgcccacccacatttttctctttccctttctctctttg

SEQ ID NO: 6798 - DNA, 201 bp, Homo sapiens
acatgagcctcctggagaaccacacccgccaagcagacgaggactacagccacgacctcatgctgctccgcctgacagagcctgctgataccatcacagaygctgtgaaggtcgtggagttgcccaccgaggaacccgaagtggggagcacctgtttggcttccggctggggcagcatcgaaccagagaatttctcatttc

SEQ ID NO: 6799 - DNA, 201 bp, Homo sapiens
ctgtttggcttccggctggggcagcatcgaaccagagaatttctcatttccagatgatctccagtgtgtggacctcaaaatcctgcctaatgatgagtgcraaaaagcccacgtccagaaggtgacagacttcatgctgtgtgtcggacacctggaaggtggcaaagacacctgtgtgggtgattcagggggcccgctgat

SEQ ID NO: 6800 - DNA, 201 bp, Homo sapiens
cttttatccttctcatctgcctcttttttgctcaccctgtttctcactgccctcccctccgcctttctcacccctctgtccttttgagctcttttttgctstgtctcttcatttgccttttgcactctcaaactctttcatcttcccattcgctgtctgtatttctccataactatatctttcttcctctgtctccgccca

SEQ ID NO: 6801 - DNA, 160 bp, Homo sapiens
ctagttctcactctgacgtcccgcgtcctttttcatttgtctgcttctcgctcccttccrtgttctgttccctcttcctccctcttccctgggcctgtttctcgctgtccctgtcttttatccttctcatctgcctcttttttgctcaccctgtttctca

SEQ ID NO: 6802 - DNA, 201 bp, Homo sapiens
agcatcgaaccagagaatttctcatttccagatgatctccagtgtgtggacctcaaaatcctgcctaatgatgagtgcaaaaaagcccacgtccagaaggwgacagacttcatgctgtgtgtcggacacctggaaggtggcaaagacacctgtgtgggtgattcagggggcccgctgatgtgtgatggtgtgctccaaggt

SEQ ID NO: 6803 - DNA, 201 bp, Homo sapiens
ccaagcagacgaggactacagccacgacctcatgctgctccgcctgacagagcctgctgataccatcacagacgctgtgaaggtcgtggagttgcccaccsaggaacccgaagtggggagcacctgtttggcttccggctggggcagcatcgaaccagagaatttctcatttccagatgatctccagtgtgtggacctcaa

SEQ ID NO: 6804 - DNA, 201 bp, Homo sapiens
ccctcccccatgctcccctgccccatccccttttccccttcccgtcttctcatccctccattcccatctttccccagcaattaccagctctggctgggtcrccacaacttgtttgacgacgaaaacacagcccagtttgttcatgtcagtgagagcttcccacaccctggcttcaacatgagcctcctggagaaccacacc

SEQ ID NO: 6805 - DNA, 201 bp, Homo sapiens
ccggctggggcagcatcgaaccagagaatttctcatttccagatgatctccagtgtgtggacctcaaaatcctgcctaatgatgagtgcaaaaaagcccaygtccagaaggtgacagacttcatgctgtgtgtcggacacctggaaggtggcaaagacacctgtgtgggtgattcagggggcccgctgatgtgtgatggtg

SEQ ID NO: 6806 - DNA, 201 bp, Homo sapiens
ttcttcctctgtctccgcccacccacatttttctctttccctttctctctttggggaccctcccccatgctcccctgccccatccccttttccccttcccrtcttctcatccctccattcccatctttccccagcaattaccagctctggctgggtcgccacaacttgtttgacgacgaaaacacagcccagtttgttcat

SEQ ID NO: 6807 - DNA, 201 bp, Homo sapiens; identical to SEQ ID NO: 6802

SEQ ID NO: 6808 - DNA, 201 bp, Homo sapiens; identical to SEQ ID NO: 6803

SEQ ID NO: 6809 - DNA, 201 bp, Homo sapiens
catttcagcactttccagtgtgggggcatcctggtgcaccgccagtgggtgctcacagctgctcattgcatcagcgacaattaccagctctggctgggtcrccacaacttgtttgacgacgaaaacacagcccagtttgttcatgtcagtgagagcttcccacaccctggcttcaacatgagcctcctggagaaccacacc

SEQ ID NO: 6810 - DNA, 201 bp, Homo sapiens; identical to SEQ ID NO: 6798

SEQ ID NO: 6811 - DNA, 201 bp, Homo sapiens; identical to SEQ ID NO: 6799

SEQ ID NO: 6812 - DNA, 201 bp, Homo sapiens; identical to SEQ ID NO: 6805

SEQ ID NO: 6813 - DNA, 201 bp, Homo sapiens
gcgatgcctcccggccaccgccccagcctcaccccatcccacgacccccgcaacccttcacatcacccccctcgaaggtcggacaggacgggtggagccgygggcgggaccctcaggcccgggcccgccgcccccagccccgcctgccgcccctccccgcctgcctggactgcgcggcgccgtgagggggattcggcccag

SEQ ID NO: 6814 - DNA, 201 bp, Homo sapiens
ctccggccaacccggaggagccccagcggggagcgcagtgctgcgccccccgcccccgcgcgccccgcagcagccgggcgttcactcatcctccctccccyaccgtccctcccttttctcctcaagtcctgaagttgagtttgagaggcgacacggcggcggcggccgcgctgctcccgctcctctgcctccccatggata

SEQ ID NO: 6815 - DNA, 201 bp, Homo sapiens
cttcgccaactcgccagcacttggagaggcccggctcccctcccggcgccctctgaccgcccccgccccgcgcgctctccgaccaccgcctctcggatgamcaggttccaggggagctgagcgagtcgcctcccccgcccagcttcagccctggctgcagctgcagcgcgagccatgcgcccccagtgcaccccggcccgg

SEQ ID NO: 6816 - DNA, 201 bp, Homo sapiens
ggggggacacagctacacgcccattaaagcacagcacgtcctgggggaggggggcattttttatgttacaaaaaaaaattacgaaagaaaagaaatctctwtgcaaaatgacgaacatggtcctgtggactcctctggcctgttttgttggctctttctctgtaattccgtgttttcgctttttcctccctgcccctctct

SEQ ID NO: 6817 - DNA, 201 bp, Homo sapiens
ccatgcgcccccagtgcaccccggcccggcccaccgccccggggccattctgctgaccgcccagccccgagccccgacagtggcaagttgcggctactgcrgttgcaagctccggccaacccggaggagccccagcggggagcgcagtgctgcgccccccgcccccgcgcgccccgcagcagccgggcgttcactcatcct

SEQ ID NO: 6818 - DNA, 201 bp, Homo sapiens
tcacccagcagcagctggaagctttggatcgggtctttgagcgtccttcctaccctgacgtcttccaggcatcagagcacatcaaatcagaacaggggaaygagtactccctcccagccctgacccctgggcttgatgaagtcaagtcgagtctatctgcatccaccaaccctgagctgggcagcaacgtgtcaggcacac

SEQ ID NO: 6819 - DNA, 201 bp, Homo sapiens
tcccagccctgacccctgggcttgatgaagtcaagtcgagtctatctgcatccaccaaccctgagctgggcagcaacgtgtcaggcacacagacatacccmgttgtgactggtcgtgacatggcgagcaccactctgcctggttacccccctcacgtgccccccactggccagggaagctaccccacctccaccctggcag

SEQ ID NO: 6820 - DNA, 201 bp, Homo sapiens
ggagctggcccaccagggtgtgcggccctgtgacatctcccggcagctgcgggtcagccacggctgtgtcagcaaaatcctgggcaggtactacgagaccrgcagcatcaagccgggtgtgatcggtggctccaagcccaaagtggcgacgcccaaagtggtggacaagattgctgaatacaaacgacagaacccgactat

SEQ ID NO: 6821 - DNA, 201 bp, Homo sapiens; identical to SEQ ID NO: 6813

SEQ ID NO: 6822 - DNA, 201 bp, Homo sapiens; identical to SEQ ID NO: 6814

SEQ ID NO: 6823 - DNA, 201 bp, Homo sapiens; identical to SEQ ID NO: 6815

SEQ ID NO: 6824 - DNA, 201 bp, Homo sapiens; identical to SEQ ID NO: 6816

SEQ ID NO: 6825 - DNA, 201 bp, Homo sapiens; identical to SEQ ID NO: 6817

SEQ ID NO: 6826 - DNA, 201 bp, Homo sapiens; identical to SEQ ID NO: 6818

SEQ ID NO: 6827 - DNA, 201 bp, Homo sapiens; identical to SEQ ID NO: 6819

SEQ ID NO: 6828 - DNA, 201 bp, Homo sapiens; identical to SEQ ID NO: 6820

SEQ ID NO: 6829 - DNA, 201 bp, Homo sapiens; identical to SEQ ID NO: 6813

SEQ ID NO: 6830 - DNA, 201 bp, Homo sapiens; identical to SEQ ID NO: 6814

SEQ ID NO: 6831 - DNA, 201 bp, Homo sapiens; identical to SEQ ID NO: 6815

SEQ ID NO: 6832 - DNA, 201 bp, Homo sapiens; identical to SEQ ID NO: 6816

SEQ ID NO: 6833 - DNA, 201 bp, Homo sapiens; identical to SEQ ID NO: 6817

SEQ ID NO: 6834 - DNA, 201 bp, Homo sapiens; identical to SEQ ID NO: 6818

SEQ ID NO: 6835 - DNA, 201 bp, Homo sapiens; identical to SEQ ID NO: 6819

SEQ ID NO: 6836 - DNA, 201 bp, Homo sapiens; identical to SEQ ID NO: 6820

SEQ ID NO: 6837 - DNA, 201 bp, Homo sapiens; identical to SEQ ID NO: 6814

SEQ ID NO: 6838 - DNA, 201 bp, Homo sapiens; identical to SEQ ID NO: 6815

SEQ ID NO: 6839 - DNA, 201 bp, Homo sapiens; identical to SEQ ID NO: 6817

SEQ ID NO: 6840 - DNA, 201 bp, Homo sapiens; identical to SEQ ID NO: 6818

SEQ ID NO: 6841 - DNA, 201 bp, Homo sapiens; identical to SEQ ID NO: 6819

SEQ ID NO: 6842 - DNA, 201 bp, Homo sapiens; identical to SEQ ID NO: 6820

SEQ ID NO: 6843 - DNA, 201 bp, Homo sapiens; identical to SEQ ID NO: 6813

SEQ ID NO: 6844 - DNA, 201 bp, Homo sapiens; identical to SEQ ID NO: 6816

SEQ ID NO: 6845 - DNA, 201 bp, Homo sapiens; identical to SEQ ID NO: 6818

SEQ ID NO: 6846 - DNA, 201 bp, Homo sapiens; identical to SEQ ID NO: 6819

SEQ ID NO: 6847 - DNA, 201 bp, Homo sapiens; identical to SEQ ID NO: 6820

SEQ ID NO: 6848 - DNA, 201 bp, Homo sapiens; identical to SEQ ID NO: 6813

SEQ ID NO: 6849 - DNA, 201 bp, Homo sapiens; identical to SEQ ID NO: 6814

SEQ ID NO: 6850 - DNA, 201 bp, Homo sapiens; identical to SEQ ID NO: 6815

SEQ ID NO: 6851 - DNA, 201 bp, Homo sapiens; identical to SEQ ID NO: 6816

SEQ ID NO: 6852 - DNA, 201 bp, Homo sapiens; identical to SEQ ID NO: 6817

SEQ ID NO: 6853 - DNA, 201 bp, Homo sapiens; identical to SEQ ID NO: 6818

SEQ ID NO: 6854 - DNA, 201 bp, Homo sapiens; identical to SEQ ID NO: 6819

SEQ ID NO: 6855 - DNA, 201 bp, Homo sapiens; identical to SEQ ID NO: 6820

SEQ ID NO: 6856 - DNA, 201 bp, Homo sapiens; identical to SEQ ID NO: 6813

SEQ ID NO: 6857 - DNA, 201 bp, Homo sapiens; identical to SEQ ID NO: 6816

SEQ ID NO: 6858 - DNA, 201 bp, Homo sapiens; identical to SEQ ID NO: 6818

SEQ ID NO: 6859 - DNA, 201 bp, Homo sapiens; identical to SEQ ID NO: 6819

SEQ ID NO: 6860 - DNA, 201 bp, Homo sapiens; identical to SEQ ID NO: 6820

SEQ ID NO: 6861 - DNA, 201 bp, Homo sapiens; identical to SEQ ID NO: 6813

SEQ ID NO: 6862 - DNA, 201 bp, Homo sapiens; identical to SEQ ID NO: 6814

SEQ ID NO: 6863 - DNA, 201 bp, Homo sapiens; identical to SEQ ID NO: 6815

SEQ ID NO: 6864 - DNA, 201 bp, Homo sapiens; identical to SEQ ID NO: 6816

SEQ ID NO: 6865 - DNA, 201 bp, Homo sapiens; identical to SEQ ID NO: 6817

SEQ ID NO: 6866 - DNA, 201 bp, Homo sapiens; identical to SEQ ID NO: 6818

SEQ ID NO: 6867 - DNA, 201 bp, Homo sapiens; identical to SEQ ID NO: 6819

SEQ ID NO: 6868 - DNA, 201 bp, Homo sapiens; identical to SEQ ID NO: 6820

SEQ ID NO: 6869 - DNA, 201 bp, Homo sapiens
tatttaacattggggttgaggctgtctcacagttggtgcaactccagtttaaaattcatctgggaacgagaatgttgagtaatggagggtgatttaaaaaacaacaacaacaacaaaaaaaaaaacacttggcttggctggaccagagagtgtgtgattctgggatttctgtgctgttgatgaggtttgtcttgccccttt

SEQ ID NO: 6870 - DNA, 201 bp, Homo sapiens
agtgaaaaaacctggcaacatttactatctctataaacgggagagtggtcagcagtatttttccatcatttctccaaaggaatgggggacaagttgtccayatgacttccttggtgcctacaaactacagcatgacttgtcctggactccgtatgaggacattgagaagcaagatgctaaaatcagcatgatggacacgtt

SEQ ID NO: 6871 - DNA, 201 bp, Homo sapiens
gttaaagtgttagagaagaccttcttcccataaaaaggttggtggatcgttttccagagagaactgttttcagtcttttatatatatatatatatatatawaactggtagtatttaacattggggttgaggctgtctcacagttggtgcaactccagtttaaaattcatctgggaacgagaatgttgagtaatggagggtg

SEQ ID NO: 6872 - DNA, 201 bp, Homo sapiens
ctgtttggtggaattagctaagtttatggattatttcgcatggctataatctattgcaatatgctgtaaaaggagggagagatgtgtacttgaactgacarttggccaaatttctctctgggaatgatgttcctgatgctgatctgtttggtaataccctccccgggccgccccccgattcatggtctttcctcataaact

SEQ ID NO: 6873 - DNA, 201 bp, Homo sapiens
atttactatctctataaacgggagagtggtcagcagtatttttccatcatttctccaaaggaatgggggacaagttgtccacatgacttccttggtgcctrcaaactacagcatgacttgtcctggactccgtatgaggacattgagaagcaagatgctaaaatcagcatgatggacacgttgctaagccagtcagtggcc

SEQ ID NO: 6874 - DNA, 201 bp, Homo sapiens
ccacatgacttccttggtgcctacaaactacagcatgacttgtcctggactccgtatgaggacattgagaagcaagatgctaaaatcagcatgatggacaygttgctaagccagtcagtggccctgcctccgtgcactgaacccaacttccagggactgactcactgagagtgggctttgacaaacagctctcacaggacc

SEQ ID NO: 6875 - DNA, 201 bp, Homo sapiens
acattggggttgaggctgtctcacagttggtgcaactccagtttaaaattcatctgggaacgagaatgttgagtaatggagggtgatttaaaaaacaacarcaacaacaaaaaaaaaaacacttggcttggctggaccagagagtgtgtgattctgggatttctgtgctgttgatgaggtttgtcttgccccttttgctct

SEQ ID NO: 6876 - DNA, 201 bp, Homo sapiens; identical to SEQ ID NO: 6869

SEQ ID NO: 6877 - DNA, 201 bp, Homo sapiens; identical to SEQ ID NO: 6870

SEQ ID NO: 6878 - DNA, 201 bp, Homo sapiens; identical to SEQ ID NO: 6871

SEQ ID NO: 6879 - DNA, 201 bp, Homo sapiens; identical to SEQ ID NO: 6874

SEQ ID NO: 6880 - DNA, 201 bp, Homo sapiens; identical to SEQ ID NO: 6872

SEQ ID NO: 6881 - DNA, 158 bp, Homo sapiens
cctactcgcacagcccagggagtggggaggataaggcgctgtcatggaggacgccgcmgcgccggggcggaccgagggggtccttgaaaggcaaggagcgccgccagctgcaggccagggaggagccctggtggagctcaccccgacccccggcggcc

SEQ ID NO: 6882 - DNA, 201 bp, Homo sapiens; identical to SEQ ID NO: 6873

SEQ ID NO: 6883 - DNA, 201 bp, Homo sapiens; identical to SEQ ID NO: 6875

SEQ ID NO: 6884 - DNA, 201 bp, Homo sapiens
acaacgtgacggagaaggtgcggcgcatcatagagtcctacttccgcctggatacgcccctctacttttcctactctcatctggtgtgccgcactgccatygaagaggtccaggcagagaggaaggatgatagtcatccagtccacgtggacaactgcatcctgaatgccgagaccctcgtgtgtgtcaaagagcccccag

SEQ ID NO: 6885 - DNA, 201 bp, Homo sapiens
tcgaagcccaaggatgagctatgacagcgtccaggtcagacggatgggtgactagacccatggagaggaactcttctgcactctgagctggccagcccctyggggctgcagagcagtgagcctacatctgccactcagccgaggggaccctgctcacagccttctacatggtgctactgctcttggagtggacatgaccag

SEQ ID NO: 6886 - DNA, 201 bp, Homo sapiens
tcttggagtggacatgaccagacaccgcaccccctggatctggctgagggctcaggacacaggcccagccacccccaggggcctccacaggccgctgcatracagcgatacagtacttaagtgtctgtgtagacaaccaaagaataaatgattcatggttttttttacttggtttgttcagacaatggaaatttgcccatt

SEQ ID NO: 6887 - DNA, 175 bp, Homo sapiens
ccctggatctggctgagggctcaggacacaggcccagccacccccaggggcctccacaggccgctgcataacagcgatacagtacttaagtgtctgtgtakacaaccaaagaataaatgattcatggttttttttacttggtttgttcagacaatggaaatttgcccattctgtc

SEQ ID NO: 6888 - DNA, 201 bp, Homo sapiens
gaattatacacaggctgttgaatgtgccaagacctatcttctcttcttccccaatgacgaggtgatgaaccaaaatttggcctattatgcagctatgcttrgagaagaacacaccagatccatcggcccccgtgagagtgccaaggagtaccgacagcgaagcctactggaaaaagaactgcttttcttcgcttatgatgt

SEQ ID NO: 6889 - DNA, 201 bp, Homo sapiens
gcgagcgggacagggtgcaggcagatgacctggtgaagatgctcttcagcccagaagagatggacctctcccaggagcagcccctggatgcccagcagggyccccccgaacctgcacaagagtctctctcaggcagtgaatcgaagcccaaggatgagctatgacagcgtccaggtcagacggatgggtgactagacccat

SEQ ID NO: 6890 - DNA, 147 bp, Homo sapiens
tggggcttcgcccgggggcgggccttcgccgggggtaggactccggycttggtggcgggtggctggcggttccgttaggtctgagggagcgatggcggtacgcgcgttgaagctgctgaccacactgctggctgtcgtggccgctgc

SEQ ID NO: 6891 - DNA, 201 bp, Homo sapiens
gtgatggacggcgtaatctctgaccacgagtgtcaggagctgcagagactgaccaatgtggcagcaacctcaggagatggctaccggggtcagacctcccsacatactcccaatgaaaagttctatggtgtcactgtcttcaaagccctcaagctggggcaagaaggcaaagttcctctgcagagtgcccacctgtactac

SEQ ID NO: 6892 - DNA, 201 bp, Homo sapiens
ccatcgaagaggtccaggcagagaggaaggatgatagtcatccagtccacgtggacaactgcatcctgaatgccgagaccctcgtgtgtgtcaaagagccyccagcctacaccttccgcgactacagcgccatcctttacctaaatggggacttcgatggcggaaacttttatttcactgaactggatgccaagaccgtga

SEQ ID NO: 6893 - DNA, 200 bp, Homo sapiens
tggggcttcgcccgggggcgggccttcgccgggggtaggactccggccttggtggcgggtggctggcggttccgttaggtctgagggagcgatggcggtrcgcgcgttgaagctgctgaccacactgctggctgtcgtggccgctgcctcccaagccgaggtcgagtccgaggcaggatggggcatggtgacgcctgatc

SEQ ID NO: 6894 - DNA, 201 bp, Homo sapiens
ttgcctactataacattgggaattatacacaggctgttgaatgtgccaagacctatcttctcttcttccccaatgacgaggtgatgaaccaaaatttggcytattatgcagctatgcttggagaagaacacaccagatccatcggcccccgtgagagtgccaaggagtaccgacagcgaagcctactggaaaaagaactgc

SEQ ID NO: 6895 - DNA, 201 bp, Homo sapiens
cgactacagcgccatcctttacctaaatggggacttcgatggcggaaacttttatttcactgaactggatgccaagaccgtgacggcagaggtgcagcctmagtgtggaagagccgtgggattctcttcaggcactgaaaacccacatggagtgaaggctgtcaccagggggcagcgctgtgccatcgccctgtggttcac

SEQ ID NO: 6896 - DNA, 201 bp, Homo sapiens
actctgagctggccagcccctcggggctgcagagcagtgagcctacatctgccactcagccgaggggaccctgctcacagccttctacatggtgctactgmtcttggagtggacatgaccagacaccgcaccccctggatctggctgagggctcaggacacaggcccagccacccccaggggcctccacaggccgctgcat

SEQ ID NO: 6897 - DNA, 201 bp, Homo sapiens
tcgcttatgatgtttttggaattccctttgtggatccggattcatggactccagaagaagtgattcccaagagattgcaagagaaacagaagtcagaacgrgaaacagccgtacgcatctcccaggagattgggaaccttatgaaggaaatcgagacccttgtggaagagaagaccaaggagtcactggatgtgagcagac

SEQ ID NO: 6898 - DNA, 201 bp, Homo sapiens
tcactgtcttcaaagccctcaagctggggcaagaaggcaaagttcctctgcagagtgcccacctgtactacaacgtgacggagaaggtgcggcgcatcatrgagtcctacttccgcctggatacgcccctctacttttcctactctcatctggtgtgccgcactgccatcgaagaggtccaggcagagaggaaggatgata

SEQ ID NO: 6899 - DNA, 201 bp, Homo sapiens
caatgtggcagcaacctcaggagatggctaccggggtcagacctccccacatactcccaatgaaaagttctatggtgtcactgtcttcaaagccctcaagstggggcaagaaggcaaagttcctctgcagagtgcccacctgtactacaacgtgacggagaaggtgcggcgcatcatagagtcctacttccgcctggatac

SEQ ID NO: 6900 - DNA, 201 bp, Homo sapiens
cagaagaagtgattcccaagagattgcaagagaaacagaagtcagaacgggaaacagccgtacgcatctcccaggagattgggaaccttatgaaggaaatygagacccttgtggaagagaagaccaaggagtcactggatgtgagcagactgacccgggaaggtggccccctgctgtatgaaggcatcagtctcaccatga

SEQ ID NO: 6901 - DNA, 201 bp, Homo sapiens; identical to SEQ ID NO: 6884

SEQ ID NO: 6902 - DNA, 201 bp, Homo sapiens; identical to SEQ ID NO: 6885

SEQ ID NO: 6903 - DNA, 201 bp, Homo sapiens; identical to SEQ ID NO: 6886

SEQ ID NO: 6904 - DNA, 175 bp, Homo sapiens; identical to SEQ ID NO: 6887

SEQ ID NO: 6905 - DNA, 201 bp, Homo sapiens
gaattatacacaggctgttgaatgtgccaagacctatcttctcttcttccccaatgacgaggtgatgaaccaaaatttggcctattatgcagctatgcttrgagaagaacacaccagatccatcggcccccgtgagcagggcacctagggaaagatgtgaccccggaaagtactcagtttccctgccctggagtgccaagg

SEQ ID NO: 6906 - DNA, 201 bp, Homo sapiens; identical to SEQ ID NO: 6889

SEQ ID NO: 6907 - DNA, 147 bp, Homo sapiens; identical to SEQ ID NO: 6890

SEQ ID NO: 6908 - DNA, 201 bp, Homo sapiens; identical to SEQ ID NO: 6891

SEQ ID NO: 6909 - DNA, 201 bp, Homo sapiens; identical to SEQ ID NO: 6892

SEQ ID NO: 6910 - DNA, 200 bp, Homo sapiens; identical to SEQ ID NO: 6893

SEQ ID NO: 6911 - DNA, 201 bp, Homo sapiens
ttgcctactataacattgggaattatacacaggctgttgaatgtgccaagacctatcttctcttcttccccaatgacgaggtgatgaaccaaaatttggcytattatgcagctatgcttggagaagaacacaccagatccatcggcccccgtgagcagggcacctagggaaagatgtgaccccggaaagtactcagtttcc

SEQ ID NO: 6912 - DNA, 201 bp, Homo sapiens; identical to SEQ ID NO: 6895

SEQ ID NO: 6913 - DNA, 201 bp, Homo sapiens; identical to SEQ ID NO: 6896

SEQ ID NO: 6914 - DNA, 201 bp, Homo sapiens
tggcaaggggtgggcaggtccagtttgggaagtcggggtggagcccagggctggccctggaatgcagtcctcagagcggctgtgctcataggtcagaacgrgaaacagccgtacgcatctcccaggagattgggaaccttatgaaggaaatcgagacccttgtggaagagaagaccaaggagtcactggatgtgagcagac

SEQ ID NO: 6915 - DNA, 201 bp, Homo sapiens; identical to SEQ ID NO: 6898

SEQ ID NO: 6916 - DNA, 201 bp, Homo sapiens; identical to SEQ ID NO: 6899

SEQ ID NO: 6917 - DNA, 201 bp, Homo sapiens
tggccctggaatgcagtcctcagagcggctgtgctcataggtcagaacgggaaacagccgtacgcatctcccaggagattgggaaccttatgaaggaaatygagacccttgtggaagagaagaccaaggagtcactggatgtgagcagactgacccgggaaggtggccccctgctgtatgaaggcatcagtctcaccatga

SEQ ID NO: 6918 - DNA, 201 bp, Homo sapiens; identical to SEQ ID NO: 6885

SEQ ID NO: 6919 - DNA, 201 bp, Homo sapiens; identical to SEQ ID NO: 6886

SEQ ID NO: 6920 - DNA, 175 bp, Homo sapiens; identical to SEQ ID NO: 6887

SEQ ID NO: 6921 - DNA, 201 bp, Homo sapiens
ccttgcaggacagggtgcaggcagatgacctggtgaagatgctcttcagcccagaagagatggacctctcccaggagcagcccctggatgcccagcagggyccccccgaacctgcacaagagtctctctcaggcagtgaatcgaagcccaaggatgagctatgacagcgtccaggtcagacggatgggtgactagacccat

SEQ ID NO: 6922 - DNA, 147 bp, Homo sapiens; identical to SEQ ID NO: 6890

SEQ ID NO: 6923 - DNA, 201 bp, Homo sapiens; identical to SEQ ID NO: 6891

SEQ ID NO: 6924 - DNA, 201 bp, Homo sapiens; identical to SEQ ID NO: 6892

SEQ ID NO: 6925 - DNA, 200 bp, Homo sapiens; identical to SEQ ID NO: 6893

SEQ ID NO: 6926 - DNA, 201 bp, Homo sapiens; identical to SEQ ID NO: 6895

SEQ ID NO: 6927 - DNA, 201 bp, Homo sapiens; identical to SEQ ID NO: 6897

SEQ ID NO: 6928 - DNA, 201 bp, Homo sapiens; identical to SEQ ID NO: 6898

SEQ ID NO: 6929 - DNA, 201 bp, Homo sapiens; identical to SEQ ID NO: 6899

SEQ ID NO: 6930 - DNA, 201 bp, Homo sapiens; identical to SEQ ID NO: 6900

SEQ ID NO: 6931 - DNA, 201 bp, Homo sapiens; identical to SEQ ID NO: 6884

SEQ ID NO: 6932 - DNA, 201 bp, Homo sapiens; identical to SEQ ID NO: 6888

SEQ ID NO: 6933 - DNA, 201 bp, Homo sapiens; identical to SEQ ID NO: 6894

SEQ ID NO: 6934 - DNA, 201 bp, Homo sapiens; identical to SEQ ID NO: 6896

SEQ ID NO: 6935 - DNA, 201 bp, Homo sapiens
accctggaccctcgacacagcgagcgggtgagagcagctcgagcgggtgagagcagctggtgctgtggtgacccgttcccagagcgcccttggtttgcctwtctcttccccaaatcccattgccagtggctgagacacgaaaggagcacttgggacaccagctccaacgccctgtcattatggtcacattgccttgtcctc

SEQ ID NO: 6936 - DNA, 201 bp, Homo sapiens; identical to SEQ ID NO: 6884

SEQ ID NO: 6937 - DNA, 166 bp, Homo sapiens
tcttggagtggacatgaccagacaccgcaccccctggatctggctgagggctcaggacacaggcccagccacccccaggggcctccacaggccgctgcatracagcgatacagtacttaagtgtctgtgtagacaaccaaagaataaatgattcatggtttttttt

SEQ ID NO: 6938 - DNA, 135 bp, Homo sapiens
ccctggatctggctgagggctcaggacacaggcccagccacccccaggggcctccacaggccgctgcataacagcgatacagtacttaagtgtctgtgtakacaaccaaagaataaatgattcatggtttttttt

SEQ ID NO: 6939 - DNA, 201 bp, Homo sapiens; identical to SEQ ID NO: 6905

SEQ ID NO: 6940 - DNA, 201 bp, Homo sapiens
cagcctcagtgtggaagagccgtgggattctcttcaggcactgaaaacccacatggagtgaaggctgtcaccaggggcagcccctggatgcccagcagggyccccccgaacctgcacaagagtctctctcaggcagtgaatcgaaccttctacatggtgctactgctcttggagtggacatgaccagacaccgcaccccct

SEQ ID NO: 6941 - DNA, 147 bp, Homo sapiens; identical to SEQ ID NO: 6890

SEQ ID NO: 6942 - DNA, 201 bp, Homo sapiens; identical to SEQ ID NO: 6891

SEQ ID NO: 6943 - DNA, 201 bp, Homo sapiens; identical to SEQ ID NO: 6892

SEQ ID NO: 6944 - DNA, 200 bp, Homo sapiens; identical to SEQ ID NO: 6893

SEQ ID NO: 6945 - DNA, 201 bp, Homo sapiens; identical to SEQ ID NO: 6911

SEQ ID NO: 6946 - DNA, 201 bp, Homo sapiens
cgactacagcgccatcctttacctaaatggggacttcgatggcggaaacttttatttcactgaactggatgccaagaccgtgacggcagaggtgcagcctmagtgtggaagagccgtgggattctcttcaggcactgaaaacccacatggagtgaaggctgtcaccaggggcagcccctggatgcccagcagggccccccc

SEQ ID NO: 6947 - DNA, 201 bp, Homo sapiens
tgtcaccaggggcagcccctggatgcccagcagggcccccccgaacctgcacaagagtctctctcaggcagtgaatcgaaccttctacatggtgctactgmtcttggagtggacatgaccagacaccgcaccccctggatctggctgagggctcaggacacaggcccagccacccccaggggcctccacaggccgctgcat

SEQ ID NO: 6948 - DNA, 201 bp, Homo sapiens; identical to SEQ ID NO: 6897

SEQ ID NO: 6949 - DNA, 201 bp, Homo sapiens; identical to SEQ ID NO: 6898

SEQ ID NO: 6950 - DNA, 201 bp, Homo sapiens; identical to SEQ ID NO: 6899

SEQ ID NO: 6951 - DNA, 201 bp, Homo sapiens; identical to SEQ ID NO: 6900

SEQ ID NO: 6952 - DNA, 201 bp, Homo sapiens
acaggagggtgaggcatccaaagagaaagaggaagtggcagaggaggcccagagtgggggagactagagggctacaggccagcgtggatgacctgaagagygctcctctgccttggacaccatcccctcctagcacaaggagtgcccgccttgagtgacatgcggctgcccacgctcctgccctcgtctccctggccaccc

SEQ ID NO: 6953 - DNA, 201 bp, Homo sapiens
agaccaaggagggggtcatgtatgtgggagccaagaccaaggagaatgttgtacagagcgtgacctcagtggccgagaagaccaaggagcaggccaacgcsgtgagcgaggctgtggtgagcagcgtcaacactgtggccaccaagaccgtggaggaggcggagaacatcgcggtcacctccggggtggtgcgcaaggagg

SEQ ID NO: 6954 - DNA, 161 bp, Homo sapiens
ctcgtctccctggccacccttggcctgtccacctgtgctgctgcaccaacctcactgccctccctcggccccacccaccctctggtccttctgaccccacwtatgctgctgtgaattttttttttaaatgattccaaataaaacttgagcccactcctgcc

SEQ ID NO: 6955 - DNA, 129 bp, Homo sapiens
ctgtgctgctgcaccaacctcactgccctccctcggccccacccaccctctggtccttctgaccccacttatgctgctgtgaattttttttttaaatgatkccaaataaaacttgagcccactcctgcc

SEQ ID NO: 6956 - DNA, 201 bp, Homo sapiens
gacctgaagagcgctcctctgccttggacaccatcccctcctagcacaaggagtgcccgccttgagtgacatgcggctgcccacgctcctgccctcgtctycctggccacccttggcctgtccacctgtgctgctgcaccaacctcactgccctccctcggccccacccaccctctggtccttctgaccccacttatgctg

SEQ ID NO: 6957 - DNA, 201 bp, Homo sapiens
ccgctctgcgatggtggctctcatacaccgcacagaagtgaggcatcggggacagccgctgcggcagcactcgagccagctcaagcccgcagctcgcaggragatccagctccgtcctgcctgcagcagcacaaccctgcacacccaccatggatgtcttcaagaagggcttctccatcgccaaggagggcgtggtgggtg

SEQ ID NO: 6958 - DNA, 201 bp, Homo sapiens
gtggccaccaagaccgtggaggaggcggagaacatcgcggtcacctccggggtggtgcgcaaggaggacttgaggccatctgccccccaacaggagggtgwggcatccaaagagaaagaggaagtggcagaggaggcccagagtgggggagactagagggctacaggccagcgtggatgacctgaagagcgctcctctgcc

SEQ ID NO: 6959 - DNA, 201 bp, Homo sapiens
ggggcttccaggcttgggacacctgggcattcctgggccaggaaagcacccaacaaacctgcaactcagaagccaaatgagacctatcccaggcaggtccrctctgcgatggtggctctcatacaccgcacagaagtgaggcatcggggacagccgctgcggcagcactcgagccagctcaagcccgcagctcgcagggag

SEQ ID NO: 6960 - DNA, 201 bp, Homo sapiens
cacagaagtgaggcatcggggacagccgctgcggcagcactcgagccagctcaagcccgcagctcgcagggagatccagctccgtcctgcctgcagcagcmcaaccctgcacacccaccatggatgtcttcaagaagggcttctccatcgccaaggagggcgtggtgggtgcggtggaaaagaccaagcagggggtgacgg

SEQ ID NO: 6961 - DNA, 201 bp, Homo sapiens
tggatgacctgaagagcgctcctctgccttggacaccatcccctcctagcacaaggagtgcccgccttgagtgacatgcggctgcccacgctcctgccctygtctccctggccacccttggcctgtccacctgtgctgctgcaccaacctcactgccctccctcggccccacccaccctctggtccttctgaccccactta

SEQ ID NO: 6962 - DNA, 161 bp, Homo sapiens; identical to SEQ ID NO: 6954

SEQ ID NO: 6963 - DNA, 129 bp, Homo sapiens; identical to SEQ ID NO: 6955

SEQ ID NO: 6964 - DNA, 201 bp, Homo sapiens; identical to SEQ ID NO: 6956

SEQ ID NO: 6965 - DNA, 201 bp, Homo sapiens; identical to SEQ ID NO: 6957

SEQ ID NO: 6966 - DNA, 201 bp, Homo sapiens; identical to SEQ ID NO: 6952

SEQ ID NO: 6967 - DNA, 201 bp, Homo sapiens
tcagccaccaagaccgtggaggaggcggagaacatcgcggtcacctccggggtggtgcgcaaggaggacttgaggccatctgccccccaacaggagggtgwggcatccaaagagaaagaggaagtggcagaggaggcccagagtgggggagactagagggctacaggccagcgtggatgacctgaagagcgctcctctgcc

SEQ ID NO: 6968 - DNA, 201 bp, Homo sapiens; identical to SEQ ID NO: 6959

SEQ ID NO: 6969 - DNA, 201 bp, Homo sapiens; identical to SEQ ID NO: 6960

SEQ ID NO: 6970 - DNA, 201 bp, Homo sapiens; identical to SEQ ID NO: 6961

SEQ ID NO: 6971 - DNA, 201 bp, Homo sapiens
ccatctgccccccaacaggagggtgaggcatccaaagagaaagaggaagtggcagaggaggtaggagctgggctcctggggtgcaccatggggggttcctkggtagggaccccatcccccacagacgcactgcttccctcctgggctcccagggcccagaggggcctcctgaccttccacagcccctacagggactgtgta

SEQ ID NO: 6972 - DNA, 201 bp, Homo sapiens
aaggctggggcctggagctgggtgtgcaggtcattctctctcccaggcccagagtgggggagactagagggctacaggccagcgtggatgacctgaagagygctcctctgccttggacaccatcccctcctagcacaaggagtgcccgccttgagtgacatgcggctgcccacgctcctgccctcgtctccctggccaccc

SEQ ID NO: 6973 - DNA, 158 bp, Homo sapiens
ctcgtctccctggccacccttggcctgtccacctgtgctgctgcaccaacctcactgccctccctcggccccacccaccctctggtccttctgaccccacwtatgctgctgtgaattttttttttaaatgattccaaataaaacttgagcccactcct

SEQ ID NO: 6974 - DNA, 201 bp, Homo sapiens; identical to SEQ ID NO: 6953

SEQ ID NO: 6975 - DNA, 126 bp, Homo sapiens
ctgtgctgctgcaccaacctcactgccctccctcggccccacccaccctctggtccttctgaccccacttatgctgctgtgaattttttttttaaatgatkccaaataaaacttgagcccactcct

SEQ ID NO: 6976 - DNA, 201 bp, Homo sapiens
tggtagggaccccatcccccacagacgcactgcttccctcctgggctcccagggcccagaggggcctcctgaccttccacagcccctacagggactgtgtrcagggctaaccctgaacctgagtgggaggtccccccacggatgacccctcaggcatggggcacagaagacaacttttctcagcccactcagggtggccca

SEQ ID NO: 6977 - DNA, 201 bp, Homo sapiens; identical to SEQ ID NO: 6956

SEQ ID NO: 6978 - DNA, 201 bp, Homo sapiens; identical to SEQ ID NO: 6957

SEQ ID NO: 6979 - DNA, 201 bp, Homo sapiens
gtggccaccaagaccgtggaggaggcggagaacatcgcggtcacctccggggtggtgcgcaaggaggacttgaggccatctgccccccaacaggagggtgwggcatccaaagagaaagaggaagtggcagaggaggtaggagctgggctcctggggtgcaccatggggggttccttggtagggaccccatcccccacagac

SEQ ID NO: 6980 - DNA, 201 bp, Homo sapiens; identical to SEQ ID NO: 6959

SEQ ID NO: 6981 - DNA, 201 bp, Homo sapiens; identical to SEQ ID NO: 6960

SEQ ID NO: 6982 - DNA, 201 bp, Homo sapiens; identical to SEQ ID NO: 6961

SEQ ID NO: 6983 - DNA, 201 bp, Homo sapiens
aggacttgaggccatctgccccccaacaggagggtgaggcatccaaagagaaagaggaagtggcagaggaggtaggagctgggctcctggggtgcaccatkgggggttccttggtagggaccccatcccccacagacgcactgcttccctcctgggctcccagggcccagaggggcctcctgaccttccacagcccctaca

SEQ ID NO: 6984 - DNA, 201 bp, Homo sapiens
ctacagggactgtgtacagggctaaccctgaacctgagtgggaggtccccccacggatgacccctcaggcatggggcacagaagacaacttttctcagccmactcagggtggcccattaaggctggggcctggagctgggtgtgcaggtcattctctctcccaggcccagagtgggggagactagagggctacaggccagc

SEQ ID NO: 6985 - DNA, 201 bp, Homo sapiens; identical to SEQ ID NO: 6952

SEQ ID NO: 6986 - DNA, 161 bp, Homo sapiens; identical to SEQ ID NO: 6954

SEQ ID NO: 6987 - DNA, 201 bp, Homo sapiens; identical to SEQ ID NO: 6953

SEQ ID NO: 6988 - DNA, 129 bp, Homo sapiens; identical to SEQ ID NO: 6955

SEQ ID NO: 6989 - DNA, 201 bp, Homo sapiens
cagctggcctccgcatcaatatttcatcggcgtcaataggaggcatcggggacagccgctgcggcagcactcgagccagctcaagcccgcagctcgcaggragatccagctccgtcctgcctgcagcagcacaaccctgcacacccaccatggatgtcttcaagaagggcttctccatcgccaaggagggcgtggtgggtg

SEQ ID NO: 6990 - DNA, 201 bp, Homo sapiens; identical to SEQ ID NO: 6956

SEQ ID NO: 6991 - DNA, 201 bp, Homo sapiens; identical to SEQ ID NO: 6958

SEQ ID NO: 6992 - DNA, 201 bp, Homo sapiens
cgtcaataggaggcatcggggacagccgctgcggcagcactcgagccagctcaagcccgcagctcgcagggagatccagctccgtcctgcctgcagcagcmcaaccctgcacacccaccatggatgtcttcaagaagggcttctccatcgccaaggagggcgtggtgggtgcggtggaaaagaccaagcagggggtgacgg

SEQ ID NO: 6993 - DNA, 201 bp, Homo sapiens; identical to SEQ ID NO: 6961

SEQ ID NO: 6994 - DNA, 201 bp, Homo sapiens
gaacagcaggaacatctgctgggagatctccagaatgatgtgcaccgggtggcagacagcctgccaggcctgtggaaagccctgcctggtaacctcacagstgcagtgatggaagcaaatcaaacagggcacgagttccctgatagatccttggagcaggtgctgctaccccacgtggacaccttcctacaagtgcatttc

SEQ ID NO: 6995 - DNA, 201 bp, Homo sapiens
ggcgcgggagctccagagcctgagcaacgacgtcaagaatgtcgggcggtgctgcgaggccgaggccggggccggggccgcctccctcaacgcctcccttsacggcctccacaacgcactcttcgccactcagcgcagcttggagcagcaccagcggctcttccacagcctctttgggaacttccaagggctcatggaagc

SEQ ID NO: 6996 - DNA, 201 bp, Homo sapiens
accccgtaggacgtaactggtgcccctacccaatgtccaagctggtcaccttactagctctttgcaaaacagagaaattcctcatccactcgcagcagccrtgtccgcagggagctccagactgccagaaagtcaaagtcatgtaccgcatggcccacaagccagtgtaccaggtcaagcagaaggtgctgacctctttgg

SEQ ID NO: 6997 - DNA, 201 bp, Homo sapiens
ggcactgcatttgggggcttcctgatgtttaagacctgaaccccagccccaatctgatcagacatcatggactcgcccagctctcctcggcctggggctcyggccaaggatgggctggaggtcattcagttggtctgtctcttccctggaaaccttctgcaaagatggtgtggtgtacgtggcttccctgtaaccacatgg

SEQ ID NO: 6998 - DNA, 201 bp, Homo sapiens
catgggcccaggcttccagtactagcctctctgatctgcagagctccaggacacctggggtctggaaggcagaggctgaggacaccggcaaggaccccgtwggacgtaactggtgcccctacccaatgtccaagctggtcaccttactagctctttgcaaaacagagaaattcctcatccactcgcagcagccgtgtccgc

SEQ ID NO: 6999 - DNA, 201 bp, Homo sapiens
cgggccgcgaggaggccgccaccaccgccctggccgggctggcgcgggagctccagagcctgagcaacgacgtcaagaatgtcgggcggtgctgcgaggcygaggccggggccggggccgcctccctcaacgcctcccttgacggcctccacaacgcactcttcgccactcagcgcagcttggagcagcaccagcggctct

SEQ ID NO: 7000 - DNA, 201 bp, Homo sapiens
ctcgcagcagccgtgtccgcagggagctccagactgccagaaagtcaaagtcatgtaccgcatggcccacaagccagtgtaccaggtcaagcagaaggtgmtgacctctttggcctggaggtgctgccctggctacacgggccccaactgcgagcaccacgattccatggcaatccctgagcctgcagatcctggtgacag

SEQ ID NO: 7001 - DNA, 201 bp, Homo sapiens
aagcggagcctttggtggacatacgggtcacagggcctgtgccaggtgccttgggcgcggcgctctgggaggcaggatcccctgtggccttctatgccagsttttcagaagggacggctgccctgcagacagtgaagttcaacaccacatacatcaacattggcagcagctacttccctgaacatggctacttccgagccc

SEQ ID NO: 7002 - DNA, 201 bp, Homo sapiens
ttggcagcagctacttccctgaacatggctacttccgagcccctgagcgtggtgtctacctgtttgcagtgagcgttgaatttggcccagggccaggcacygggcagctggtgtttggaggtcaccatcggactccagtctgtaccactgggcaggggagtggaagcacagcaacggtctttgccatggctgagctgcaga

SEQ ID NO: 7003 - DNA, 201 bp, Homo sapiens
ggggctgctgggggcatgggcccaggcttccagtactagcctctctgatctgcagagctccaggacacctggggtctggaaggcagaggctgaggacaccrgcaaggaccccgtaggacgtaactggtgcccctacccaatgtccaagctggtcaccttactagctctttgcaaaacagagaaattcctcatccactcgca

SEQ ID NO: 7004 - DNA, 201 bp, Homo sapiens
tgaatttggcccagggccaggcaccgggcagctggtgtttggaggtcaccatcggactccagtctgtaccactgggcaggggagtggaagcacagcaacgstctttgccatggctgagctgcagaagggtgagcgagtatggtttgagttaacccagggatcaataacaaagagaagcctgtcgggcactgcatttggggg

SEQ ID NO: 7005 - DNA, 201 bp, Homo sapiens
tcagacatcatggactcgcccagctctcctcggcctggggctctggccaaggatgggctggaggtcattcagttggtctgtctcttccctggaaaccttcygcaaagatggtgtggtgtacgtggcttccctgtaaccacatggggcttggccatttctccatgatgagaaggactggaatgcttctccgggcaggacatg

SEQ ID NO: 7006 - DNA, 201 bp, Homo sapiens
caggaacctcaggatggaccagtcagcttcaaacctggccaccttgctgcagtgatcaatgaggttgaggtgcaacaggaacagcaggaacatctgctggsagatctccagaatgatgtgcaccgggtggcagacagcctgccaggcctgtggaaagccctgcctggtaacctcacagctgcagtgatggaagcaaatcaa

SEQ ID NO: 7007 - DNA, 201 bp, Homo sapiens
aatactttttcagttcccttcttccttccctctcaatccactagctttcatgttgggcaaggaaaagttgaggaaggatggctgatggtgatggaaagctrtgttaatggtatgaggaatgtgtgaaaagtatacacaaagggctctgaagctcaagtcagaggagtgggaggtctgatcattgttggtggaaaaacgtaa

SEQ ID NO: 7008 - DNA, 201 bp, Homo sapiens
ttaatggtatgaggaatgtgtgaaaagtatacacaaagggctctgaagctcaagtcagaggagtgggaggtctgatcattgttggtggaaaaacgtaaggktattttgtgtttttaagttggttttacaattctttcctggggaaattatttctggaggggaaaaagatccattctacgtatccttgtggagaaaagctaa

SEQ ID NO: 7009 - DNA, 201 bp, Homo sapiens
aggagaaaaacttgattttagatttccctcagccttcaaccgattacttaagtttccggagccactttcagaagaactttgtctgtctggagaactgctcrttgcaagagcgaacagtgacagggactgttaaagtcaaaaatgtgagttttgagaagaaagttcagatccgtatcactttcgattcttggaaaaactaca

SEQ ID NO: 7010 - DNA, 201 bp, Homo sapiens
gtgctcacacaaccaagccaagaagcgcgttgtgtttgctgactccaagggcctctctctcactgcgatccatgtcttctccgacctcccagaagaaccakcgtgggatctgcagtttgatctcttggaccttaatgatatctcctctgccttaaaacaccacgaggagaaaaacttgattttagatttccctcagccttc

SEQ ID NO: 7011 - DNA, 201 bp, Homo sapiens
gggatctgcagtttgatctcttggaccttaatgatatctcctctgccttaaaacaccacgaggagaaaaacttgattttagatttccctcagccttcaacygattacttaagtttccggagccactttcagaagaactttgtctgtctggagaactgctcgttgcaagagcgaacagtgacagggactgttaaagtcaaaa

SEQ ID NO: 7012 - DNA, 144 bp, Homo sapiens
cagcgaccgccgcgggggcaaggcctggagctgtggttcgaatytgtgcaggcagcgggtgctggcttttagggtccgccgcctctctgcctaatgagctgcaccagaatgatccaggttttagatccacgtcctttgacaagt

SEQ ID NO: 7013 - DNA, 201 bp, Homo sapiens
taccatgctaatgggcaagtcttttgggacaacaatgatggtcagaattatagaattgttcatgttcaatggaagcctgatggggtgcagacacagatggyaccccaggactgtgcattccaccagacgtctcctaagacagagttagagtcaacaatctttggcagtccgaggctggctagtgggctcttcccagagtgg

SEQ ID NO: 7014 - DNA, 201 bp, Homo sapiens
aacaccacgaggagaaaaacttgattttagatttccctcagccttcaaccgattacttaagtttccggagccactttcagaagaactttgtctgtctggaraactgctcgttgcaagagcgaacagtgacagggactgttaaagtcaaaaatgtgagttttgagaagaaagttcagatccgtatcactttcgattcttgga

SEQ ID NO: 7015 - DNA, 201 bp, Homo sapiens
cgcttggttggcgcgggcgcctggctgccttcctcgtggtggggccttcggagcaatcgtcctggttctggcgatggttgagacgcctcgattgcggcgtrtaacgaacaccttccaccatgaccacctcagcaagttcccacttaaataaaggcatcaagcaggtgtacatgtccctgcctcagggtgagaaagtccagg

SEQ ID NO: 7016 - DNA, 201 bp, Homo sapiens
ctaaaggaaaaaaccatccaggtcacggggcaccaaatttgagacaaatagtcggattagaaataaagcatctcattttgagtagagagcaagggaagtgrttcttagatggtgatctgggattaggccctcaagacccttttgggtttctgccctgcccaccctctggagaaggtgggcactggattagttaacagacaa

SEQ ID NO: 7017 - DNA, 201 bp, Homo sapiens
gtatcttgatgtctttgttaagactgctgaagaattattttttttcttttataataaggaataaaccccacctttattccttcatttcatctaccattttytggttcttgtgttggctgtggcaggccagctgtggttttcttttgccatgacaacttctaattgccatgtacagtatgttcaaagtcaaataactcctca

SEQ ID NO: 7018 - DNA, 201 bp, Homo sapiens
tgcctgagtggaatttcgatggctctagtactttacagtctgagggttccaacagtgacatgtatctcgtgcctgctgccatgtttcgggaccccttccgwaaggaccctaacaagctggtgttatgtgaagttttcaagtacaatcgaaggcctgcagagaccaatttgaggcacacctgtaaacggataatggacatgg

SEQ ID NO: 7019 - DNA, 201 bp, Homo sapiens
ggttcttagatggtgatctgggattaggccctcaagacccttttgggtttctgccctgcccaccctctggagaaggtgggcactggattagttaacagacracacgttactagcagtcacttgatctccgtggctttggtttaaaagacacacttgtccacataggtttagagataagagttggctggtcaacttgagcat

SEQ ID NO: 7020 - DNA, 201 bp, Homo sapiens
acagggctggagtcaaaacacttgtaattttgtatcttgatgtctttgttaagactgctgaagaattattttttttcttttataataaggaataaaccccmcctttattccttcatttcatctaccattttctggttcttgtgttggctgtggcaggccagctgtggttttcttttgccatgacaacttctaattgccatg

SEQ ID NO: 7021 - DNA, 201 bp, Homo sapiens
tcttagatggtgatctgggattaggccctcaagacccttttgggtttctgccctgcccaccctctggagaaggtgggcactggattagttaacagacaacrcgttactagcagtcacttgatctccgtggctttggtttaaaagacacacttgtccacataggtttagagataagagttggctggtcaacttgagcatgtt

SEQ ID NO: 7022 - DNA, 201 bp, Homo sapiens
ggggaggagggtggggagacataaccactgcttccatttaatggggtgcacctgtccaataggcgtagctatccggacagagcacgtttgcagaagggggwctcttcttccaggtagctgaaaggggaagacctgacgtactctggttaggttaggacttgccctcgtggtggaaacttttcttaaaaagttataaccaac

SEQ ID NO: 7023 - DNA, 201 bp, Homo sapiens
gctgtggttttcttttgccatgacaacttctaattgccatgtacagtatgttcaaagtcaaataactcctcattgtaaacaaactgtgtaactgcccaaarcagcacttataaatcagcctaacataagatctctctgatgtgtttgtgattctttcaaatccctatgtgccattatatttctttatttcctaaaacaggc

SEQ ID NO: 7024 - DNA, 201 bp, Homo sapiens
ccattcctgggaactggaatggtgcaggctgccataccaacttcagcaccaaggccatgcgggaggagaatggtctgaagtacatcgaggaggccattgaraaactaagcaagcggcaccagtaccacatccgtgcctatgatcccaagggaggcctggacaatgcccgacgtctaactggattccatgaaacctccaaca

SEQ ID NO: 7025 - DNA, 201 bp, Homo sapiens
tcatcttgcatcgtgtgtgtgaagactttggagtgatagcaacctttgatcctaagcccattcctgggaactggaatggtgcaggctgccataccaacttyagcaccaaggccatgcgggaggagaatggtctgaagtacatcgaggaggccattgagaaactaagcaagcggcaccagtaccacatccgtgcctatgatc

SEQ ID NO: 7026 - DNA, 201 bp, Homo sapiens
ggatcgatggtactggagaaggactgcgctgcaagacccggaccctggacagtgagcccaagtgtgtggaagagttgcctgagtggaatttcgatggctcyagtactttacagtctgagggttccaacagtgacatgtatctcgtgcctgctgccatgtttcgggaccccttccgtaaggaccctaacaagctggtgttat

SEQ ID NO: 7027 - DNA, 201 bp, Homo sapiens
gaataaaccccacctttattccttcatttcatctaccattttctggttcttgtgttggctgtggcaggccagctgtggttttcttttgccatgacaacttytaattgccatgtacagtatgttcaaagtcaaataactcctcattgtaaacaaactgtgtaactgcccaaagcagcacttataaatcagcctaacataaga

SEQ ID NO: 7028 - DNA, 201 bp, Homo sapiens
tttttcttttataataaggaataaaccccacctttattccttcatttcatctaccattttctggttcttgtgttggctgtggcaggccagctgtggttttyttttgccatgacaacttctaattgccatgtacagtatgttcaaagtcaaataactcctcattgtaaacaaactgtgtaactgcccaaagcagcacttata

SEQ ID NO: 7029 - DNA, 201 bp, Homo sapiens
aaaaaccatccaggtcacggggcaccaaatttgagacaaatagtcggattagaaataaagcatctcattttgagtagagagcaagggaagtggttcttagrtggtgatctgggattaggccctcaagacccttttgggtttctgccctgcccaccctctggagaaggtgggcactggattagttaacagacaacacgttac

SEQ ID NO: 7030 - DNA, 201 bp, Homo sapiens
ttcttccaggtagctgaaaggggaagacctgacgtactctggttaggttaggacttgccctcgtggtggaaacttttcttaaaaagttataaccaactttyctattaaaagtgggaattaggagagaaggtaggggttgggaatcagagagaatggctttggtctcttgcttgtgggactagcctggcttgggactaaatg

SEQ ID NO: 7031 - DNA, 201 bp, Homo sapiens
tttctgccctgcccaccctctggagaaggtgggcactggattagttaacagacaacacgttactagcagtcacttgatctccgtggctttggtttaaaagrcacacttgtccacataggtttagagataagagttggctggtcaacttgagcatgttactgacagagggggtattggggttattttctggtaggaatagca

SEQ ID NO: 7032 - DNA, 201 bp, Homo sapiens; identical to SEQ ID NO: 7015

SEQ ID NO: 7033 - DNA, 201 bp, Homo sapiens; identical to SEQ ID NO: 7016

SEQ ID NO: 7034 - DNA, 201 bp, Homo sapiens; identical to SEQ ID NO: 7018

SEQ ID NO: 7035 - DNA, 201 bp, Homo sapiens; identical to SEQ ID NO: 7019

SEQ ID NO: 7036 - DNA, 118 bp, Homo sapiens
acagggctggagtcaaaacacttgtaattttgtatcttgatgtctttgttaagactgctgaagaattattttttttcttttataataaggaataaaccccmcctttattccttcattt

SEQ ID NO: 7037 - DNA, 201 bp, Homo sapiens; identical to SEQ ID NO: 7021

SEQ ID NO: 7038 - DNA, 201 bp, Homo sapiens; identical to SEQ ID NO: 7022

SEQ ID NO: 7039 - DNA, 201 bp, Homo sapiens; identical to SEQ ID NO: 7024

SEQ ID NO: 7040 - DNA, 201 bp, Homo sapiens; identical to SEQ ID NO: 7025

SEQ ID NO: 7041 - DNA, 201 bp, Homo sapiens; identical to SEQ ID NO: 7026

SEQ ID NO: 7042 - DNA, 201 bp, Homo sapiens; identical to SEQ ID NO: 7029

SEQ ID NO: 7043 - DNA, 201 bp, Homo sapiens
ttcttccaggtagctgaaaggggaagacctgacgtactctggttaggttaggacttgccctcgtggtggaaacttttcttaaaaagttataaccaactttyctattaaaagtgggaattaggagagaagggactagcctggcttgggactaaatgccctgctctgaacacgaagcttagtataaactgatggatatcccta

SEQ ID NO: 7044 - DNA, 201 bp, Homo sapiens; identical to SEQ ID NO: 7031

SEQ ID NO: 7045 - DNA, 201 bp, Homo sapiens; identical to SEQ ID NO: 7022

SEQ ID NO: 7046 - DNA, 201 bp, Homo sapiens; identical to SEQ ID NO: 7015

SEQ ID NO: 7047 - DNA, 201 bp, Homo sapiens; identical to SEQ ID NO: 7024

SEQ ID NO: 7048 - DNA, 201 bp, Homo sapiens; identical to SEQ ID NO: 7016

SEQ ID NO: 7049 - DNA, 201 bp, Homo sapiens; identical to SEQ ID NO: 7025

SEQ ID NO: 7050 - DNA, 201 bp, Homo sapiens; identical to SEQ ID NO: 7026

SEQ ID NO: 7051 - DNA, 201 bp, Homo sapiens; identical to SEQ ID NO: 7018

SEQ ID NO: 7052 - DNA, 201 bp, Homo sapiens
ggttcttagatggtgatctgggattaggccctcaagacccttttgggtttctgccctgcccaccctctggagaaggtgggcactggattagttaacagacracacgttactagcagtcacttgatctccgtggctttggtttgagcatgttactgacagagggggtattggggttattttctggtaggaatagcatgtcac

SEQ ID NO: 7053 - DNA, 201 bp, Homo sapiens; identical to SEQ ID NO: 7029

SEQ ID NO: 7054 - DNA, 201 bp, Homo sapiens
tcttagatggtgatctgggattaggccctcaagacccttttgggtttctgccctgcccaccctctggagaaggtgggcactggattagttaacagacaacrcgttactagcagtcacttgatctccgtggctttggtttgagcatgttactgacagagggggtattggggttattttctggtaggaatagcatgtcactaa

SEQ ID NO: 7055 - DNA, 201 bp, Homo sapiens; identical to SEQ ID NO: 7043

SEQ ID NO: 7056 - DNA, 201 bp, Homo sapiens; identical to SEQ ID NO: 7026

SEQ ID NO: 7057 - DNA, 191 bp, Homo sapiens
ggccctgcagagtcgagagtgggagaagagcggagcgtgtgagcagtactgcggcctcctctcctctcctaacctcgctctcgcggcctasctttacccgcccgcctgctcggcgaccagaacaccttccaccatgaccacctcagcaagttcccacttaaataaaggcatcaagcaggtgtacatgtccc

SEQ ID NO: 7058 - DNA, 104 bp, Homo sapiens
ggcyctgcagagtcgagagtgggagaagagcggagcgtgtgagcagtactgcggcctcctctcctctcctaacctcgctctcgcggcctacctttacccgcccg

SEQ ID NO: 7059 - DNA, 201 bp, Homo sapiens; identical to SEQ ID NO: 7016

SEQ ID NO: 7060 - DNA, 165 bp, Homo sapiens
ggccctgcagagtcgagagtgggagaagagcggagcgtgtgagcagtactgcggcctcctctcckctcctaacctcgctctcgcggcctacctttacccgcccgcctgctcggcgaccagaacaccttccaccatgaccacctcagcaagttcccacttaaataa

SEQ ID NO: 7061 - DNA, 201 bp, Homo sapiens; identical to SEQ ID NO: 7019

SEQ ID NO: 7062 - DNA, 201 bp, Homo sapiens; identical to SEQ ID NO: 7018

SEQ ID NO: 7063 - DNA, 201 bp, Homo sapiens; identical to SEQ ID NO: 7017

SEQ ID NO: 7064 - DNA, 201 bp, Homo sapiens; identical to SEQ ID NO: 7020

SEQ ID NO: 7065 - DNA, 201 bp, Homo sapiens; identical to SEQ ID NO: 7021

SEQ ID NO: 7066 - DNA, 201 bp, Homo sapiens; identical to SEQ ID NO: 7022

SEQ ID NO: 7067 - DNA, 201 bp, Homo sapiens; identical to SEQ ID NO: 7023

SEQ ID NO: 7068 - DNA, 201 bp, Homo sapiens; identical to SEQ ID NO: 7024

SEQ ID NO: 7069 - DNA, 201 bp, Homo sapiens; identical to SEQ ID NO: 7025

SEQ ID NO: 7070 - DNA, 201 bp, Homo sapiens; identical to SEQ ID NO: 7027

SEQ ID NO: 7071 - DNA, 201 bp, Homo sapiens; identical to SEQ ID NO: 7028

SEQ ID NO: 7072 - DNA, 201 bp, Homo sapiens; identical to SEQ ID NO: 7029

SEQ ID NO: 7073 - DNA, 201 bp, Homo sapiens; identical to SEQ ID NO: 7031

SEQ ID NO: 7074 - DNA, 201 bp, Homo sapiens; identical to SEQ ID NO: 7030

SEQ ID NO: 7075 - DNA, 201 bp, Homo sapiens; identical to SEQ ID NO: 7016

SEQ ID NO: 7076 - DNA, 153 bp, Homo sapiens
tcgagagtgggagaagagcggagcgtgtgagcagtactgcggcctcctctcckctcctaacctcgctctcgcgaacaccttccaccatgaccacctcagcaagttcccacttaaataaaggcatcaagcaggtgtacatgtccctgcctcagg

SEQ ID NO: 7077 - DNA, 201 bp, Homo sapiens; identical to SEQ ID NO: 7017

SEQ ID NO: 7078 - DNA, 201 bp, Homo sapiens; identical to SEQ ID NO: 7018

SEQ ID NO: 7079 - DNA, 201 bp, Homo sapiens; identical to SEQ ID NO: 7019

SEQ ID NO: 7080 - DNA, 201 bp, Homo sapiens; identical to SEQ ID NO: 7020

SEQ ID NO: 7081 - DNA, 201 bp, Homo sapiens; identical to SEQ ID NO: 7021

SEQ ID NO: 7082 - DNA, 201 bp, Homo sapiens; identical to SEQ ID NO: 7022

SEQ ID NO: 7083 - DNA, 201 bp, Homo sapiens; identical to SEQ ID NO: 7023

SEQ ID NO: 7084 - DNA, 201 bp, Homo sapiens; identical to SEQ ID NO: 7024

SEQ ID NO: 7085 - DNA, 201 bp, Homo sapiens; identical to SEQ ID NO: 7025

SEQ ID NO: 7086 - DNA, 201 bp, Homo sapiens; identical to SEQ ID NO: 7026

SEQ ID NO: 7087 - DNA, 201 bp, Homo sapiens; identical to SEQ ID NO: 7027

SEQ ID NO: 7088 - DNA, 201 bp, Homo sapiens; identical to SEQ ID NO: 7028

SEQ ID NO: 7089 - DNA, 201 bp, Homo sapiens; identical to SEQ ID NO: 7029

SEQ ID NO: 7090 - DNA, 201 bp, Homo sapiens; identical to SEQ ID NO: 7030

SEQ ID NO: 7091 - DNA, 201 bp, Homo sapiens; identical to SEQ ID NO: 7031

SEQ ID NO: 7092 - DNA, 201 bp, Homo sapiens
gattaagtcagaattgtttttcctgtcatttgttggaagcttcttgagttctgttattagcattcagggaattgatacccatcaacttgaatggaaaatcstttgtaggtattacttaagtgaatgttaagagttccaccctgagtggtaatctaaggctgtgcagtcagttacttcagactgctcagaatagttcattag

SEQ ID NO: 7093 - DNA, 201 bp, Homo sapiens
ataatagaaatgcggctagttcagagagatttttagagctgtggtggacttcatagatgaattcaagtgttgagggaggattaaagaaatatataccgtgwttatgtgtgtgtgcttatttgtttgaatgattttattttccatttctcaaaggttttatttttttggttagggccttaaaatttcaggactgtgattatt

SEQ ID NO: 7094 - DNA, 201 bp, Homo sapiens
agtggggatctagaggaggatttgcaggaagagctcgtggaagaggtggtggccccagtcaaaactggaaccagggatatagtaactattggaatcaaggytatggcaactatggatataacagccaaggttacggtggttatggaggatatgactacactggttacaacaactactatggatatggtgattatagcacgg

SEQ ID NO: 7095 - DNA, 201 bp, Homo sapiens
caaactcctccccacgacactctgaagcagcgacggcacagcgggaagaatggaaaatgtttataggaggccttagctgggacactacaaagaaagatctkaaggactacttttccaaatttggtgaagttgtagactgcactctgaagttagatcctatcacagggcgatcaaggggttttggctttgtgctatttaaag

SEQ ID NO: 7096 - DNA, 153 bp, Homo sapiens
gccacaccccggcctaacgctgctgctcccgccgctactggagtggtggggargggcccccaaggctgtgcaacgcggagcgtgagaggaaggtataaagggtagcgagagggcgggaccgaggaggaaagggaaaaaaaaaaaactaggggg

SEQ ID NO: 7097 - DNA, 201 bp, Homo sapiens
tcaaactcctccccacgacactctgaagcagcgacggcacagcgggaagaatggaaaatgtttataggaggccttagctgggacactacaaagaaagatcygaaggactacttttccaaatttggtgaagttgtagactgcactctgaagttagatcctatcacagggcgatcaaggggttttggctttgtgctatttaaa

SEQ ID NO: 7098 - DNA, 201 bp, Homo sapiens
cgaatgctgccgtttggtggtgaagcagtattttccaatttgaagattcatttgaaggtggctcctgccacctgctaatagcagttcaaactaaatttttwgtatcaagtccctgaatggaagtatgacgttgggtccctctgaagtttaattctgagttctcattaaaagaaatttgctttcattgttttatttcttaat

SEQ ID NO: 7099 - DNA, 201 bp, Homo sapiens
gccgaaattgaggacatgattaaaattgcagtgaagtttgaaatgtttttagcaaaatctaatttttgccataatgtgtcctccctgtccaaattgggaaygacttaatgtcaatttgtttgttggttgttttaataatacttccttatgtagccattaagatttatatgaatattttcccaaatgcccagtttttgctta

SEQ ID NO: 7100 - DNA, 201 bp, Homo sapiens
atatgaatattttcccaaatgcccagtttttgcttaatatgtattgtgctttttagaacaaatctggataaatgtgcaaaagtacccctttgcacagatarttaatgttttatgcttccattaaataaaaaggacttaaaatctgttaattataatagaaatgcggctagttcagagagatttttagagctgtggtggact

SEQ ID NO: 7101 - DNA, 201 bp, Homo sapiens
gtatccaggcgaggtggtcatcaaaatagctacaaaccatactaaattattccatttgcaacttatccccaacaggtatgttctaaaaatagtttttttttgtcatttacaatagtagtttttataatctatattgttcataaaacaatgcttaatttaagagtttcacagcacccagaagtgcttaccatattataacat

SEQ ID NO: 7102 - DNA, 201 bp, Homo sapiens
attattccatttgcaacttatccccaacaggtatgttctaaaaatagtttttttttgtcatttacaatagtagtttttataatctatattgttcataaaayaatgcttaatttaagagtttcacagcacccagaagtgcttaccatattataacatagtgactttcaaagatatgtaacacaggtgctcttaagcttttgc

SEQ ID NO: 7103 - DNA, 201 bp, Homo sapiens
tgcttttcccatttatagacgttgtagcagtaattgcaagaagttcttgagctgaattcctgttgtgacaacttcctataattacagtagataactttttyttttagtcgtatataacttttctataacttgtgatggacaagagatatgcttatccaataaaataagcttaaatattagatgctcttgggtcaaaatgtc

SEQ ID NO: 7104 - DNA, 201 bp, Homo sapiens
tcttctttgtctccaggtggtgaagcagtattttccaatttgaagattcatttgaaggtggctcctgccacctgctaatagcagttcaaactaaatttttwgtatcaagtccctgaatggaagtatgacgttgggtccctctgaagtttaattctgagttctcattaaaagaaatttgctttcattgttttatttcttaat

SEQ ID NO: 7105 - DNA, 201 bp, Homo sapiens; identical to SEQ ID NO: 7092

SEQ ID NO: 7106 - DNA, 201 bp, Homo sapiens; identical to SEQ ID NO: 7093

SEQ ID NO: 7107 - DNA, 201 bp, Homo sapiens; identical to SEQ ID NO: 7095

SEQ ID NO: 7108 - DNA, 153 bp, Homo sapiens; identical to SEQ ID NO: 7096

SEQ ID NO: 7109 - DNA, 201 bp, Homo sapiens; identical to SEQ ID NO: 7097

SEQ ID NO: 7110 - DNA, 201 bp, Homo sapiens; identical to SEQ ID NO: 7098

SEQ ID NO: 7111 - DNA, 201 bp, Homo sapiens; identical to SEQ ID NO: 7099

SEQ ID NO: 7112 - DNA, 201 bp, Homo sapiens; identical to SEQ ID NO: 7100

SEQ ID NO: 7113 - DNA, 201 bp, Homo sapiens; identical to SEQ ID NO: 7092

SEQ ID NO: 7114 - DNA, 201 bp, Homo sapiens; identical to SEQ ID NO: 7095

SEQ ID NO: 7115 - DNA, 201 bp, Homo sapiens; identical to SEQ ID NO: 7097

SEQ ID NO: 7116 - DNA, 201 bp, Homo sapiens
aacttatccccaacaggtggtgaagcagtattttccaatttgaagattcatttgaaggtggctcctgccacctgctaatagcagttcaaactaaatttttwgtatcaagtccctgaatggaagtatgacgttgggtccctctgaagtttaattctgagttctcattaaaagaaatttgctttcattgttttatttcttaat

SEQ ID NO: 7117 - DNA, 201 bp, Homo sapiens; identical to SEQ ID NO: 7093

SEQ ID NO: 7118 - DNA, 201 bp, Homo sapiens; identical to SEQ ID NO: 7099

SEQ ID NO: 7119 - DNA, 201 bp, Homo sapiens; identical to SEQ ID NO: 7100

SEQ ID NO: 7120 - DNA, 201 bp, Homo sapiens; identical to SEQ ID NO: 7101

SEQ ID NO: 7121 - DNA, 201 bp, Homo sapiens; identical to SEQ ID NO: 7102

SEQ ID NO: 7122 - DNA, 153 bp, Homo sapiens; identical to SEQ ID NO: 7096

SEQ ID NO: 7123 - DNA, 201 bp, Homo sapiens
ccgagtcggagggggcgaagattgacgccagtaagaacgaggaggatgaagggaaaatgtttataggaggccttagctgggacactacaaagaaagatctkaaggactacttttccaaatttggtgaagttgtagactgcactctgaagttagatcctatcacagggcgatcaaggggttttggctttgtgctatttaaag

SEQ ID NO: 7124 - DNA, 201 bp, Homo sapiens; identical to SEQ ID NO: 7103

SEQ ID NO: 7125 - DNA, 201 bp, Homo sapiens
gccgagtcggagggggcgaagattgacgccagtaagaacgaggaggatgaagggaaaatgtttataggaggccttagctgggacactacaaagaaagatcygaaggactacttttccaaatttggtgaagttgtagactgcactctgaagttagatcctatcacagggcgatcaaggggttttggctttgtgctatttaaa

SEQ ID NO: 7126 - DNA, 201 bp, Homo sapiens; identical to SEQ ID NO: 7104

SEQ ID NO: 7127 - DNA, 201 bp, Homo sapiens
agtggggatctagaggaggatttgcaggaagagctcgtggaagaggtggtggccccagtcaaaactggaaccagggatatagtaactattggaatcaaggytatggcaactatggatataacagccaaggttacggtggttatggaggatatgactacactggttacaacaactactatggatatggtgattatagcaacc

SEQ ID NO: 7128 - DNA, 201 bp, Homo sapiens; identical to SEQ ID NO: 7101

SEQ ID NO: 7129 - DNA, 201 bp, Homo sapiens; identical to SEQ ID NO: 7102

SEQ ID NO: 7130 - DNA, 201 bp, Homo sapiens; identical to SEQ ID NO: 7123

SEQ ID NO: 7131 - DNA, 153 bp, Homo sapiens; identical to SEQ ID NO: 7096

SEQ ID NO: 7132 - DNA, 201 bp, Homo sapiens; identical to SEQ ID NO: 7125

SEQ ID NO: 7133 - DNA, 201 bp, Homo sapiens; identical to SEQ ID NO: 7103

SEQ ID NO: 7134 - DNA, 201 bp, Homo sapiens; identical to SEQ ID NO: 7104

SEQ ID NO: 7135 - DNA, 201 bp, Homo sapiens; identical to SEQ ID NO: 7092

SEQ ID NO: 7136 - DNA, 201 bp, Homo sapiens; identical to SEQ ID NO: 7093

SEQ ID NO: 7137 - DNA, 201 bp, Homo sapiens; identical to SEQ ID NO: 7127

SEQ ID NO: 7138 - DNA, 201 bp, Homo sapiens; identical to SEQ ID NO: 7095

SEQ ID NO: 7139 - DNA, 201 bp, Homo sapiens; identical to SEQ ID NO: 7097

SEQ ID NO: 7140 - DNA, 201 bp, Homo sapiens; identical to SEQ ID NO: 7116

SEQ ID NO: 7141 - DNA, 201 bp, Homo sapiens; identical to SEQ ID NO: 7099

SEQ ID NO: 7142 - DNA, 201 bp, Homo sapiens; identical to SEQ ID NO: 7100

SEQ ID NO: 7143 - DNA, 153 bp, Homo sapiens; identical to SEQ ID NO: 7096

SEQ ID NO: 7144 - DNA, 201 bp, Homo sapiens; identical to SEQ ID NO: 7095

SEQ ID NO: 7145 - DNA, 201 bp, Homo sapiens; identical to SEQ ID NO: 7097

SEQ ID NO: 7146 - DNA, 201 bp, Homo sapiens
aacttatccccaacaggtggtgaagcagtattttccaatttgaagattcatttgaaggtggctcctgccacctgctaatagcagttcaaactaaatttttwgtatcaagtccctgaatggaagtatgacgttgggtccctgccctttcccccagtattgtagagcaagtcttgtgttaaaagcccagtgtgacagtgtcat

SEQ ID NO: 7147 - DNA, 201 bp, Homo sapiens; identical to SEQ ID NO: 7092

SEQ ID NO: 7148 - DNA, 201 bp, Homo sapiens; identical to SEQ ID NO: 7093

SEQ ID NO: 7149 - DNA, 201 bp, Homo sapiens; identical to SEQ ID NO: 7127

SEQ ID NO: 7150 - DNA, 201 bp, Homo sapiens; identical to SEQ ID NO: 7123

SEQ ID NO: 7151 - DNA, 153 bp, Homo sapiens; identical to SEQ ID NO: 7096

SEQ ID NO: 7152 - DNA, 201 bp, Homo sapiens; identical to SEQ ID NO: 7125

SEQ ID NO: 7153 - DNA, 201 bp, Homo sapiens; identical to SEQ ID NO: 7098

SEQ ID NO: 7154 - DNA, 201 bp, Homo sapiens; identical to SEQ ID NO: 7099

SEQ ID NO: 7155 - DNA, 201 bp, Homo sapiens; identical to SEQ ID NO: 7100

SEQ ID NO: 7156 - DNA, 201 bp, Homo sapiens; identical to SEQ ID NO: 7092

SEQ ID NO: 7157 - DNA, 201 bp, Homo sapiens; identical to SEQ ID NO: 7093

SEQ ID NO: 7158 - DNA, 201 bp, Homo sapiens; identical to SEQ ID NO: 7127

SEQ ID NO: 7159 - DNA, 201 bp, Homo sapiens; identical to SEQ ID NO: 7095

SEQ ID NO: 7160 - DNA, 153 bp, Homo sapiens; identical to SEQ ID NO: 7096

SEQ ID NO: 7161 - DNA, 201 bp, Homo sapiens; identical to SEQ ID NO: 7097

SEQ ID NO: 7162 - DNA, 201 bp, Homo sapiens; identical to SEQ ID NO: 7098

SEQ ID NO: 7163 - DNA, 201 bp, Homo sapiens; identical to SEQ ID NO: 7099

SEQ ID NO: 7164 - DNA, 201 bp, Homo sapiens; identical to SEQ ID NO: 7100

SEQ ID NO: 7165 - DNA, 201 bp, Homo sapiens; identical to SEQ ID NO: 7092

SEQ ID NO: 7166 - DNA, 201 bp, Homo sapiens; identical to SEQ ID NO: 7093

SEQ ID NO: 7167 - DNA, 201 bp, Homo sapiens; identical to SEQ ID NO: 7127

SEQ ID NO: 7168 - DNA, 201 bp, Homo sapiens; identical to SEQ ID NO: 7123

SEQ ID NO: 7169 - DNA, 201 bp, Homo sapiens; identical to SEQ ID NO: 7125

SEQ ID NO: 7170 - DNA, 201 bp, Homo sapiens; identical to SEQ ID NO: 7116

SEQ ID NO: 7171 - DNA, 201 bp, Homo sapiens; identical to SEQ ID NO: 7099

SEQ ID NO: 7172 - DNA, 201 bp, Homo sapiens; identical to SEQ ID NO: 7100

SEQ ID NO: 7173 - DNA, 153 bp, Homo sapiens; identical to SEQ ID NO: 7096

SEQ ID NO: 7174 - DNA, 201 bp, Homo sapiens; identical to SEQ ID NO: 7095

SEQ ID NO: 7175 - DNA, 201 bp, Homo sapiens; identical to SEQ ID NO: 7097

SEQ ID NO: 7176 - DNA, 201 bp, Homo sapiens; identical to SEQ ID NO: 7146

SEQ ID NO: 7177 - DNA, 201 bp, Homo sapiens
cggagctggtgtggccattccccaagtgccactggcccatggatgggggtgggtgctggtgccagctgggctgggtgtgggttctgtgtccttccaggatmtgtgtcatttcccatgaggggccggggcaggtggctgggtgggggcacaggctggagtattcttagttctactggttctacactgtgaggtggcaatggg

SEQ ID NO: 7178 - DNA, 201 bp, Homo sapiens
tccgtttccccccgaggatcgaggtggtgcgctctggacggggttgtgcattctcgccgcgcccgggcggacgatccagcgaacagccccgcttctaaccmgagatgctgctgccggcgcccgcgctccgccgcgccctgctgtcccgcccctggaccggggccggcctgcggtggaagcacacctcctccctgaaggtgg

SEQ ID NO: 7179 - DNA, 201 bp, Homo sapiens
gaaagaacttccacttcgtgcaccgctcggccgacgtggagagcgtggtgagcgggaccctccgctcagccttcgagtacggtggccagaagtgttccgcstgctcgcgtctctacgtgccgcactcgctgtggccgcagatcaaagggcggctgctggaggagcacagtcggatcaaagtgggcgaccctgcagaggatt

SEQ ID NO: 7180 - DNA, 201 bp, Homo sapiens
actttgtggagccctgcatcgtggagagcaaggaccctcaggagcccatcatgaaggaggagatcttcgggcctgtactgtctgtgtacgtctacccggaygacaagtacaaggagacgctgcagctggttgacagcaccaccagctatggcctcacgggggcagtgttctcccaggataaggacgtcgtgcaggaggcca

SEQ ID NO: 7181 - DNA, 201 bp, Homo sapiens
tgatccgtttccccccgaggatcgaggtggtgcgctctggacggggttgtgcattctcgccgcgcccgggcggacgatccagcgaacagccccgcttctarcccgagatgctgctgccggcgcccgcgctccgccgcgccctgctgtcccgcccctggaccggggccggcctgcggtggaagcacacctcctccctgaagg

SEQ ID NO: 7182 - DNA, 201 bp, Homo sapiens
gggtcttcctccaggatgcctgcatgggaccccacccggagctggtgtggccattccccaagtgccactggcccatggatgggggtgggtgctggtgccasctgggctgggtgtgggttctgtgtccttccaggatatgtgtcatttcccatgaggggccggggcaggtggctgggtgggggcacaggctggagtattctt

SEQ ID NO: 7183 - DNA, 201 bp, Homo sapiens
tggagagcgtggtgagcgggaccctccgctcagccttcgagtacggtggccagaagtgttccgcctgctcgcgtctctacgtgccgcactcgctgtggccrcagatcaaagggcggctgctggaggagcacagtcggatcaaagtgggcgaccctgcagaggattttgggaccttcttctctgcagtgattgatgccaagt

SEQ ID NO: 7184 - DNA, 201 bp, Homo sapiens
caaggaccctcaggagcccatcatgaaggaggagatcttcgggcctgtactgtctgtgtacgtctacccggatgacaagtacaaggagacgctgcagctgrttgacagcaccaccagctatggcctcacgggggcagtgttctcccaggataaggacgtcgtgcaggaggccacaaaggtgctgaggaatgctgccggcaa

SEQ ID NO: 7185 - DNA, 201 bp, Homo sapiens
atgactttcaaggatggttcttaggggactgtgaaagtgttgggtcttcctccaggatgcctgcatgggaccccacccggagctggtgtggccattccccragtgccactggcccatggatgggggtgggtgctggtgccagctgggctgggtgtgggttctgtgtccttccaggatatgtgtcatttcccatgaggggcc

SEQ ID NO: 7186 - DNA, 201 bp, Homo sapiens
tcgccgcaggtcatcaaggagacacataagcccctgggggactggagctacgcgtacatgcagtgagcccctctcgggctccaccgtccagctgtctgtcygtccagatgcctcctgcttggattctgagtggtcagagatctgtaaagcatgactttcaaggatggttcttaggggactgtgaaagtgttgggtcttcct

SEQ ID NO: 7187 - DNA, 201 bp, Homo sapiens
catgactttcaaggatggttcttaggggactgtgaaagtgttgggtcttcctccaggatgcctgcatgggaccccacccggagctggtgtggccattcccsaagtgccactggcccatggatgggggtgggtgctggtgccagctgggctgggtgtgggttctgtgtccttccaggatatgtgtcatttcccatgaggggc

SEQ ID NO: 7188 - DNA, 201 bp, Homo sapiens
aacttccacttcgtgcaccgctcggccgacgtggagagcgtggtgagcgggaccctccgctcagccttcgagtacggtggccagaagtgttccgcctgctygcgtctctacgtgccgcactcgctgtggccgcagatcaaagggcggctgctggaggagcacagtcggatcaaagtgggcgaccctgcagaggattttggg

SEQ ID NO: 7189 - DNA, 177 bp, Homo sapiens
cagctgggctgggtgtgggttctgtgtccttccaggatatgtgtcatttcccatgaggggccggggcaggtggctgggtgggggcacaggctggagtattyttagttctactggttctacactgtgaggtggcaatgggatttgctcagatgccacccaataaaatgcctgttactt

SEQ ID NO: 7190 - DNA, 201 bp, Homo sapiens
tcggcggcaacctggcgggggcaccggccctgatgggcaacgtggtcctatggaagcccagtgacactgccatgctggccagctatgctgtctaccgcatycttcgggaggctggcctgccccccaacatcatccagtttgtgccagctgatgggcccctatttggggacactgtcaccagctcagagcacctctgtggca

SEQ ID NO: 7191 - DNA, 201 bp, Homo sapiens
ttgggaccttcttctctgcagtgattgatgccaagtcctttgcccgtatcaagaagtggctggagcacgcacgctcctcacccagcctcaccatcctggcygggggcaagtgtgatgactccgtgggctactttgtggagccctgcatcgtggagagcaaggaccctcaggagcccatcatgaaggaggagatcttcgggc

SEQ ID NO: 7192 - DNA, 201 bp, Homo sapiens
tcaggagcccatcatgaaggaggagatcttcgggcctgtactgtctgtgtacgtctacccggatgacaagtacaaggagacgctgcagctggttgacagcrccaccagctatggcctcacgggggcagtgttctcccaggataaggacgtcgtgcaggaggccacaaaggtgctgaggaatgctgccggcaacttctacat

SEQ ID NO: 7193 - DNA, 201 bp, Homo sapiens
tccagctgtctgtccgtccagatgcctcctgcttggattctgagtggtcagagatctgtaaagcatgactttcaaggatggttcttaggggactgtgaaartgttgggtcttcctccaggatgcctgcatgggaccccacccggagctggtgtggccattccccaagtgccactggcccatggatgggggtgggtgctggt

SEQ ID NO: 7194 - DNA, 201 bp, Homo sapiens
tctcccaggataaggacgtcgtgcaggaggccacaaaggtgctgaggaatgctgccggcaacttctacatcaacgacaagtccactggctcgatagtgggycagcagccctttgggggggcccgagcctctggaaccaatgacaagccagggggcccacactacatcctgcgctggacgtcgccgcaggtcatcaaggaga

SEQ ID NO: 7195 - DNA, 201 bp, Homo sapiens
tgggcgaccctgcagaggattttgggaccttcttctctgcagtgattgatgccaagtcctttgcccgtatcaagaagtggctggagcacgcacgctcctcrcccagcctcaccatcctggccgggggcaagtgtgatgactccgtgggctactttgtggagccctgcatcgtggagagcaaggaccctcaggagcccatca

SEQ ID NO: 7196 - DNA, 201 bp, Homo sapiens
ggtgagcgggaccctccgctcagccttcgagtacggtggccagaagtgttccgcctgctcgcgtctctacgtgccgcactcgctgtggccgcagatcaaarggcggctgctggaggagcacagtcggatcaaagtgggcgaccctgcagaggattttgggaccttcttctctgcagtgattgatgccaagtcctttgcccg

SEQ ID NO: 7197 - DNA, 201 bp, Homo sapiens
ggatcaaagtgggcgaccctgcagaggattttgggaccttcttctctgcagtgattgatgccaagtcctttgcccgtatcaagaagtggctggagcacgcrcgctcctcacccagcctcaccatcctggccgggggcaagtgtgatgactccgtgggctactttgtggagccctgcatcgtggagagcaaggaccctcagg

SEQ ID NO: 7198 - DNA, 201 bp, Homo sapiens
tccctgcccctccaggtgtccagggtaaagtgtaactcagactgacctgtggggcacagggggcaccagctggccttgccctctctggtctgggctgtctrccttcctcactgtatctttgcccagacccacctgggccagtaggcccctgtccccagccacacaccttagatgctggcatgccttactccaggtgcctgt

SEQ ID NO: 7199 - DNA, 201 bp, Homo sapiens; identical to SEQ ID NO: 7179

SEQ ID NO: 7200 - DNA, 201 bp, Homo sapiens; identical to SEQ ID NO: 7180

SEQ ID NO: 7201 - DNA, 201 bp, Homo sapiens; identical to SEQ ID NO: 7181

SEQ ID NO: 7202 - DNA, 201 bp, Homo sapiens; identical to SEQ ID NO: 7183

SEQ ID NO: 7203 - DNA, 201 bp, Homo sapiens; identical to SEQ ID NO: 7184

SEQ ID NO: 7204 - DNA, 201 bp, Homo sapiens
tcgccgcaggtcatcaaggagacacataagcccctgggggactggagctacgcgtacatgcagtgagcccctctcgggctccaccgtccagctgtctgtcygtccaggtggccgacctcactgcacagaccccactccagcccctccaccccttcttcatgcacagctgcctttctataatccgggcttgactcccttctt

SEQ ID NO: 7205 - DNA, 201 bp, Homo sapiens
catgactttcaaggatggttcttaggggactgtgaaagtgttgggtcttcctccaggatgcctgcatgggaccccacccggagctggtgtggccattcccsaagtgctggtgccagctgggctgggtgtgggttctgtgtccttccaggatatgtgtcatttcccatgaggggccggggcaggtggctgggtgggggcaca

SEQ ID NO: 7206 - DNA, 201 bp, Homo sapiens; identical to SEQ ID NO: 7188

SEQ ID NO: 7207 - DNA, 201 bp, Homo sapiens; identical to SEQ ID NO: 7190

SEQ ID NO: 7208 - DNA, 201 bp, Homo sapiens
ccagctgtctgtccgtccaggtggccgacctcactgcacagaccccactccagcccctccaccccttcttcatgcacagctgcctttctataatccgggcytgactcccttcttaccactgtattctggcctctcccatgcctcaggctctggtttgagatcgtgctggggaggaacatggccactaccccttatcccatc

SEQ ID NO: 7209 - DNA, 201 bp, Homo sapiens; identical to SEQ ID NO: 7194

SEQ ID NO: 7210 - DNA, 201 bp, Homo sapiens
tgtttggccgaggcctgtgtgattcccggtctgcaccacatggcggggttggggggccgctggaggccacctgccaaggcgtgggatgggatggtcctgcyggtttaggccgtgattctggaaaaccttggatgggccttcgtcctatgtcagccttccctttgatcctcaggccctacctgtagagacctccactcctag

SEQ ID NO: 7211 - DNA, 201 bp, Homo sapiens
tccaggatgcctgcatgggaccccacccggagctggtgtggccattccccaagtgctggtgccagctgggctgggtgtgggttctgtgtccttccaggatmtgtgtcatttcccatgaggggccggggcaggtggctgggtgggggcacaggctggagtattcttagttctactggttctacactgtgaggtggcaatggg

SEQ ID NO: 7212 - DNA, 201 bp, Homo sapiens; identical to SEQ ID NO: 7178

SEQ ID NO: 7213 - DNA, 201 bp, Homo sapiens
tggttcttaggggactgtgaaagtgttgggtcttcctccaggatgcctgcatgggaccccacccggagctggtgtggccattccccaagtgctggtgccasctgggctgggtgtgggttctgtgtccttccaggatatgtgtcatttcccatgaggggccggggcaggtggctgggtgggggcacaggctggagtattctt

SEQ ID NO: 7214 - DNA, 201 bp, Homo sapiens
ggaggccattctgggccccttggcaaacctcaccactcacagaggctcctggccttgatccctgcccctccaggtgtccagggtaaagtgtaactcagacygacctgtggggcacagggggcaccagctggccttgccctctctggtctgggctgtctaccttcctcactgtatctttgcccagacccacctgggccagta

SEQ ID NO: 7215 - DNA, 201 bp, Homo sapiens
ccgtccagctgtctgtccgtccaggtggccgacctcactgcacagaccccactccagcccctccaccccttcttcatgcacagctgcctttctataatccrggcttgactcccttcttaccactgtattctggcctctcccatgcctcaggctctggtttgagatcgtgctggggaggaacatggccactaccccttatcc

SEQ ID NO: 7216 - DNA, 201 bp, Homo sapiens
cttcatgcacagctgcctttctataatccgggcttgactcccttcttaccactgtattctggcctctcccatgcctcaggctctggtttgagatcgtgctrgggaggaacatggccactaccccttatcccatcggccatgtgggaggtatgaccctggtgcctggcaggttctccctctgccctccactgggcccagtgg

SEQ ID NO: 7217 - DNA, 201 bp, Homo sapiens
atgactttcaaggatggttcttaggggactgtgaaagtgttgggtcttcctccaggatgcctgcatgggaccccacccggagctggtgtggccattccccragtgctggtgccagctgggctgggtgtgggttctgtgtccttccaggatatgtgtcatttcccatgaggggccggggcaggtggctgggtgggggcacag

SEQ ID NO: 7218 - DNA, 201 bp, Homo sapiens
ggaggccacctgccaaggcgtgggatgggatggtcctgccggtttaggccgtgattctggaaaaccttggatgggccttcgtcctatgtcagccttccctytgatcctcaggccctacctgtagagacctccactcctagagccagtctcagggtctgggatttccctgcaggagctcagccaccactgtgccatggtgac

SEQ ID NO: 7219 - DNA, 184 bp, Homo sapiens
cagctgggctgggtgtgggttctgtgtccttccaggatatgtgtcatttcccatgaggggccggggcaggtggctgggtgggggcacaggctggagtattyttagttctactggttctacactgtgaggtggcaatgggatttgctcagatgccacccaataaaatgcctgttacttaatcaca

SEQ ID NO: 7220 - DNA, 201 bp, Homo sapiens
aggcctgtgtgattcccggtctgcaccacatggcggggttggggggccgctggaggccacctgccaaggcgtgggatgggatggtcctgccggtttaggcygtgattctggaaaaccttggatgggccttcgtcctatgtcagccttccctttgatcctcaggccctacctgtagagacctccactcctagagccagtctc

SEQ ID NO: 7221 - DNA, 201 bp, Homo sapiens; identical to SEQ ID NO: 7191

SEQ ID NO: 7222 - DNA, 201 bp, Homo sapiens; identical to SEQ ID NO: 7192

SEQ ID NO: 7223 - DNA, 201 bp, Homo sapiens
tgaccacgattcctcccacagatgcctcctgcttggattctgagtggtcagagatctgtaaagcatgactttcaaggatggttcttaggggactgtgaaartgttgggtcttcctccaggatgcctgcatgggaccccacccggagctggtgtggccattccccaagtgctggtgccagctgggctgggtgtgggttctgt

SEQ ID NO: 7224 - DNA, 201 bp, Homo sapiens; identical to SEQ ID NO: 7195

SEQ ID NO: 7225 - DNA, 201 bp, Homo sapiens
ttccctgcaggagctcagccaccactgtgccatggtgacacaggccaaggcagacattggccctcccttctcccagcccccagaggcctggccttgggttygtcagcatgggccgaggacgttgcctgtagaatcctcctctgcctgggagtggctctgtgtggaccagtccctcactggcccattctttttttgacgcag

SEQ ID NO: 7226 - DNA, 201 bp, Homo sapiens; identical to SEQ ID NO: 7197

SEQ ID NO: 7227 - DNA, 201 bp, Homo sapiens; identical to SEQ ID NO: 7196

SEQ ID NO: 7228 - DNA, 201 bp, Homo sapiens
ggatttccctgcaggagctcagccaccactgtgccatggtgacacaggccaaggcagacattggccctcccttctcccagcccccagaggcctggccttgrgttcgtcagcatgggccgaggacgttgcctgtagaatcctcctctgcctgggagtggctctgtgtggaccagtccctcactggcccattctttttttgac

SEQ ID NO: 7229 - DNA, 201 bp, Homo sapiens; identical to SEQ ID NO: 7198

SEQ ID NO: 7230 - DNA, 201 bp, Homo sapiens; identical to SEQ ID NO: 7179

SEQ ID NO: 7231 - DNA, 201 bp, Homo sapiens; identical to SEQ ID NO: 7180

SEQ ID NO: 7232 - DNA, 201 bp, Homo sapiens; identical to SEQ ID NO: 7181

SEQ ID NO: 7233 - DNA, 201 bp, Homo sapiens; identical to SEQ ID NO: 7183

SEQ ID NO: 7234 - DNA, 201 bp, Homo sapiens; identical to SEQ ID NO: 7184

SEQ ID NO: 7235 - DNA, 201 bp, Homo sapiens; identical to SEQ ID NO: 7204

SEQ ID NO: 7236 - DNA, 201 bp, Homo sapiens; identical to SEQ ID NO: 7187

SEQ ID NO: 7237 - DNA, 201 bp, Homo sapiens; identical to SEQ ID NO: 7188

SEQ ID NO: 7238 - DNA, 201 bp, Homo sapiens; identical to SEQ ID NO: 7190

SEQ ID NO: 7239 - DNA, 201 bp, Homo sapiens; identical to SEQ ID NO: 7208

SEQ ID NO: 7240 - DNA, 201 bp, Homo sapiens; identical to SEQ ID NO: 7194

SEQ ID NO: 7241 - DNA, 201 bp, Homo sapiens; identical to SEQ ID NO: 7210

SEQ ID NO: 7242 - DNA, 201 bp, Homo sapiens; identical to SEQ ID NO: 7177

SEQ ID NO: 7243 - DNA, 201 bp, Homo sapiens; identical to SEQ ID NO: 7178

SEQ ID NO: 7244 - DNA, 201 bp, Homo sapiens; identical to SEQ ID NO: 7182

SEQ ID NO: 7245 - DNA, 201 bp, Homo sapiens; identical to SEQ ID NO: 7214

SEQ ID NO: 7246 - DNA, 201 bp, Homo sapiens; identical to SEQ ID NO: 7215

SEQ ID NO: 7247 - DNA, 201 bp, Homo sapiens; identical to SEQ ID NO: 7216

SEQ ID NO: 7248 - DNA, 201 bp, Homo sapiens; identical to SEQ ID NO: 7185

SEQ ID NO: 7249 - DNA, 201 bp, Homo sapiens; identical to SEQ ID NO: 7218

SEQ ID NO: 7250 - DNA, 179 bp, Homo sapiens
cagctgggctgggtgtgggttctgtgtccttccaggatatgtgtcatttcccatgaggggccggggcaggtggctgggtgggggcacaggctggagtattyttagttctactggttctacactgtgaggtggcaatgggatttgctcagatgccacccaataaaatgcctgttacttaa

SEQ ID NO: 7251 - DNA, 201 bp, Homo sapiens; identical to SEQ ID NO: 7220

SEQ ID NO: 7252 - DNA, 201 bp, Homo sapiens; identical to SEQ ID NO: 7191

SEQ ID NO: 7253 - DNA, 201 bp, Homo sapiens; identical to SEQ ID NO: 7192

SEQ ID NO: 7254 - DNA, 201 bp, Homo sapiens
tgaccacgattcctcccacagatgcctcctgcttggattctgagtggtcagagatctgtaaagcatgactttcaaggatggttcttaggggactgtgaaartgttgggtcttcctccaggatgcctgcatgggaccccacccggagctggtgtggccattccccaagtgccactggcccatggatgggggtgggtgctggt

SEQ ID NO: 7255 - DNA, 201 bp, Homo sapiens; identical to SEQ ID NO: 7195

SEQ ID NO: 7256 - DNA, 201 bp, Homo sapiens; identical to SEQ ID NO: 7225

SEQ ID NO: 7257 - DNA, 201 bp, Homo sapiens; identical to SEQ ID NO: 7197

SEQ ID NO: 7258 - DNA, 201 bp, Homo sapiens; identical to SEQ ID NO: 7196

SEQ ID NO: 7259 - DNA, 201 bp, Homo sapiens; identical to SEQ ID NO: 7228

SEQ ID NO: 7260 - DNA, 201 bp, Homo sapiens
aggagcggccgagtgccctctctcgcctcggcgcccgcatccggggccatccgtcctgccgtctctgcggaggccgcatctggcgcgcatctggaaccgcycggccggccgcgctggagcccgcgcccaccctggcccggccgcgccgggagccctgcccggagctggagccgcacctggagccgcgggcccggggccctg

SEQ ID NO: 7261 - DNA, 144 bp, Homo sapiens
agagaaaggtggaaggaagggaaggaggacacattttaattttttggggggatcgagtggcaaagttgaagggacaaggcactgtgaggggaaggcagagsctcactgtgtttaaactactatgcaaaaaacaaaacaaacaac

SEQ ID NO: 7262 - DNA, 201 bp, Homo sapiens
gtgacatgaaccgacacctgcacgagtacatggagatgtgcagcatgaagcgaggcctggacgtgcagatggagacctgccgccggctcatcaaaggctcygcagacaggaattcaccgtcccccagctccgtggccagcagcgactcaggaagtacagatgagatccaggatgagttcgagcgcgaggcggatgtggagc

SEQ ID NO: 7263 - DNA, 201 bp, Homo sapiens
ctgagcaggacggggaggtgaaccggttctcggacgatgaggtcggctccatgaacatcaccgatgagatgaagcgcatgtttaaccagctgcgggagacstttgactttgacgacgactgtgacagcctgacgtgggaagagaatgaagacacgctgctgctctgggaggatttcaccaactgcaatccgaccatcgacc

SEQ ID NO: 7264 - DNA, 201 bp, Homo sapiens
ggccccgcgcagataccgcggcctccaccgcgtcccgaggagcggccgagtgccctctctcgcctcggcgcccgcatccggggccatccgtcctgccgtckctgcggaggccgcatctggcgcgcatctggaaccgcccggccggccgcgctggagcccgcgcccaccctggcccggccgcgccgggagccctgcccggag

SEQ ID NO: 7265 - DNA, 201 bp, Homo sapiens
aggtcggctccatgaacatcaccgatgagatgaagcgcatgtttaaccagctgcgggagacctttgactttgacgacgactgtgacagcctgacgtgggargagaatgaagacacgctgctgctctgggaggatttcaccaactgcaatccgaccatcgacctgcagggcgagcaagaggaaaacttgggcaacttgatcc

SEQ ID NO: 7266 - DNA, 201 bp, Homo sapiens
ggccctgccacctctcctcatggggccaggaaggcccctcggagtggggttcgaagccacaccacacagactttctctgccctcccttctctggaggcccygagggactgctgcttccttccttccttccacaccaccaacgggtgccccgtctccatcccccacccacccaaggaatggtgctgtcaatttctattgttc

SEQ ID NO: 7267 - DNA, 201 bp, Homo sapiens
gatcttccaggtggtccccaaaaagaaagagcgtaaggtggcttccgatgatgacatctctgagcaggacggggaggtgaaccggttctcggacgatgagrtcggctccatgaacatcaccgatgagatgaagcgcatgtttaaccagctgcgggagacctttgactttgacgacgactgtgacagcctgacgtgggaaga

SEQ ID NO: 7268 - DNA, 201 bp, Homo sapiens
ggagatgtgcagcatgaagcgaggcctggacgtgcagatggagacctgccgccggctcatcaaaggctccgcagacaggaattcaccgtcccccagctccrtggccagcagcgactcaggaagtacagatgagatccaggatgagttcgagcgcgaggcggatgtggagcccatggtcagctgatgactgaggccctgcga

SEQ ID NO: 7269 - DNA, 144 bp, Homo sapiens; identical to SEQ ID NO: 7261

SEQ ID NO: 7270 - DNA, 201 bp, Homo sapiens; identical to SEQ ID NO: 7262

SEQ ID NO: 7271 - DNA, 201 bp, Homo sapiens; identical to SEQ ID NO: 7263

SEQ ID NO: 7272 - DNA, 201 bp, Homo sapiens; identical to SEQ ID NO: 7265

SEQ ID NO: 7273 - DNA, 201 bp, Homo sapiens; identical to SEQ ID NO: 7266

SEQ ID NO: 7274 - DNA, 201 bp, Homo sapiens; identical to SEQ ID NO: 7267

SEQ ID NO: 7275 - DNA, 201 bp, Homo sapiens; identical to SEQ ID NO: 7268

SEQ ID NO: 7276 - DNA, 201 bp, Homo sapiens
tgcagagactgggggtgaacaccgccgtcttcgagaggcgccatgtgatcgggggtgcagctgtcactgaggagatcatcccagggtttaagttctcccgygcgtcctacctgctcagcctgctgaggccgcagatttacactgatctggagctgaagaaacatgggctgaggcttcatcttcgaaacccctactccttca

SEQ ID NO: 7277 - DNA, 201 bp, Homo sapiens
accccagtggattgtcagttttgccattatcccctgcatcctggaggtgacaccgcctggttaataggcaacactcccgacggcccagcacagccccaggrcagcaggaggctggcctgtggccaagaatgcatggtggagggggcctggagggggactgcagctcctcctcttcctgcttcctccctgctccaccccgtg

SEQ ID NO: 7278 - DNA, 146 bp, Homo sapiens
gagaattacagacagcgaacttgcccctaagccctcgttgtgggtktgtgtttgagcatttaggagaggactccagtgctcctcagcgacagacacagctgcctctgcggtgtctgaaggccctggtcgtggtgacgctagatggc

SEQ ID NO: 7279 - DNA, 200 bp, Homo sapiens
gagaattacagacagcgaacttgcccctaagccctcgttgtgggtttgtgtttgagcatttaggagaggactccagtgctcctcagcgacagacacagcygcctctgcggtgtctgaaggccctggtcgtggtgacgctagatggccgccctgggcgcctcctgtgggcgtagaggcatcaccactctgcactggcagac

SEQ ID NO: 7280 - DNA, 201 bp, Homo sapiens
agttggagcagagtctgacacgagcacttgccatcccaggcgtttcagttctgactgagaaggtagatgcacaggggaggagagggccctttcgagctccrctctgcctccaccactcattccctaaccccgcagcctcagcgccctcatctgtaaaatggggagttttgcctacagggttcagcacaatgccagcctgac

SEQ ID NO: 7281 - DNA, 201 bp, Homo sapiens
tctgactgagaaggtagatgcacaggggaggagagggccctttcgagctccactctgcctccaccactcattccctaaccccgcagcctcagcgccctcayctgtaaaatggggagttttgcctacagggttcagcacaatgccagcctgacataggaaccccagtggattgtcagttttgccattatcccctgcatcctg

SEQ ID NO: 7282 - DNA, 201 bp, Homo sapiens
cagcatggagttggagcagagtctgacacgagcacttgccatcccaggcgtttcagttctgactgagaaggtagatgcacaggggaggagagggccctttygagctccactctgcctccaccactcattccctaaccccgcagcctcagcgccctcatctgtaaaatggggagttttgcctacagggttcagcacaatgcc

SEQ ID NO: 7283 - DNA, 201 bp, Homo sapiens
ggagggggcctggagggggactgcagctcctcctcttcctgcttcctccctgctccaccccgtgcctagggcagcacaaaagccaatcgctagcaaactcsctgcctagcaaggcccagcctggggcagaaatggctgcaagtggccgaggtctctgcaaggctgtggccgcctctcccttcccggcgtggagacgagata

SEQ ID NO: 7284 - DNA, 201 bp, Homo sapiens
agcatggagttggagcagagtctgacacgagcacttgccatcccaggcgtttcagttctgactgagaaggtagatgcacaggggaggagagggccctttcragctccactctgcctccaccactcattccctaaccccgcagcctcagcgccctcatctgtaaaatggggagttttgcctacagggttcagcacaatgcca

SEQ ID NO: 7285 - DNA, 201 bp, Homo sapiens
tggcagagacatcctcacaccaccagatttggagagaatcttcgggcttcctggagggaacatattccactgcgccatgtccctggaccagctctacttcrcccgccccgtgcccctgcattctggctaccgctgccctctccagggcctgtatctctgtggaagtggggctcatcctggaggaggtgtgatgggagctgc

SEQ ID NO: 7286 - DNA, 201 bp, Homo sapiens
cctagcaaggcccagcctggggcagaaatggctgcaagtggccgaggtctctgcaaggctgtggccgcctctcccttcccggcgtggagacgagataacayggaagccaggggaggtctgaagcctgagtatgatgcggtggtgataggagcaggacacaacggactggtggctgcagcgtacctgcagagactgggggtg

SEQ ID NO: 7287 - DNA, 141 bp, Homo sapiens
gagaattacagacagcgaacttgcccctaagccctcgttgwgggtttgtgtttgagcatttaggagaggactccagtgctcctcagcgacagacacagctgcctctgcggtgtctgaaggccctggtcgtggtgacgctag

SEQ ID NO: 7288 - DNA, 201 bp, Homo sapiens
ccttcccacaggcctgtgattgagctctgcatcccttcctcgctggaccccaccctggctccccctggctgccatgtagtctccctcttcactcagtacaygccctatacgctggctggaggcaaggcctgggacgagcaggagagagacgcttatgcagacagagtgtttgattgcatcgaggtctatgcccctggcttc

SEQ ID NO: 7289 - DNA, 201 bp, Homo sapiens
gacgagataacacggaagccaggggaggtctgaagcctgagtatgatgcggtggtgataggagcaggacacaacggactggtggctgcagcgtacctgcasagactgggggtgaacaccgccgtcttcgagaggcgccatgtgatcgggggtgcagctgtcactgaggagatcatcccagggtttaagttctcccgcgcgt

SEQ ID NO: 7290 - DNA, 201 bp, Homo sapiens
gccatgtagtctccctcttcactcagtacatgccctatacgctggctggaggcaaggcctgggacgagcaggagagagacgcttatgcagacagagtgttygattgcatcgaggtctatgcccctggcttcaaggactctgtggttggcagagacatcctcacaccaccagatttggagagaatcttcgggcttcctggag

SEQ ID NO: 7291 - DNA, 201 bp, Homo sapiens
acaatgccagcctgacataggaaccccagtggattgtcagttttgccattatcccctgcatcctggaggtgacaccgcctggttaataggcaacactcccracggcccagcacagccccagggcagcaggaggctggcctgtggccaagaatgcatggtggagggggcctggagggggactgcagctcctcctcttcctgc

SEQ ID NO: 7292 - DNA, 201 bp, Homo sapiens; identical to SEQ ID NO: 7276

SEQ ID NO: 7293 - DNA, 201 bp, Homo sapiens; identical to SEQ ID NO: 7277

SEQ ID NO: 7294 - DNA, 146 bp, Homo sapiens; identical to SEQ ID NO: 7278

SEQ ID NO: 7295 - DNA, 200 bp, Homo sapiens; identical to SEQ ID NO: 7279

SEQ ID NO: 7296 - DNA, 201 bp, Homo sapiens; identical to SEQ ID NO: 7280

SEQ ID NO: 7297 - DNA, 201 bp, Homo sapiens; identical to SEQ ID NO: 7281

SEQ ID NO: 7298 - DNA, 201 bp, Homo sapiens; identical to SEQ ID NO: 7282

SEQ ID NO: 7299 - DNA, 201 bp, Homo sapiens; identical to SEQ ID NO: 7283

SEQ ID NO: 7300 - DNA, 201 bp, Homo sapiens; identical to SEQ ID NO: 7284

SEQ ID NO: 7301 - DNA, 201 bp, Homo sapiens; identical to SEQ ID NO: 7285

SEQ ID NO: 7302 - DNA, 201 bp, Homo sapiens; identical to SEQ ID NO: 7286

SEQ ID NO: 7303 - DNA, 141 bp, Homo sapiens; identical to SEQ ID NO: 7287

SEQ ID NO: 7304 - DNA, 201 bp, Homo sapiens; identical to SEQ ID NO: 7288

SEQ ID NO: 7305 - DNA, 201 bp, Homo sapiens; identical to SEQ ID NO: 7289

SEQ ID NO: 7306 - DNA, 201 bp, Homo sapiens; identical to SEQ ID NO: 7290

SEQ ID NO: 7307 - DNA, 201 bp, Homo sapiens; identical to SEQ ID NO: 7291

SEQ ID NO: 7308 - DNA, 201 bp, Homo sapiens
ctgatgctactaaggatgacggtgtctactcaaggtatttcacaacttatgacacgaatggtagatacagtgtaaaagtgcgggctctgggaggagttaasgcagccagacggagagtgataccccagcagagtggagcactgtacatacctggctggattgagaatgatgaaatacaatggaatccaccaagacctgaaa

SEQ ID NO: 7309 - DNA, 201 bp, Homo sapiens
ttcaggctgttgataaggtcgatctgaaatcagaaatatccaacattgcacgagtatctttgtttattcctccacagactccgccagagacacctagtccygatgaaacgtctgctccttgtcctaatattcatatcaacagcaccattcctggcattcacattttaaaaattatgtggaagtggataggagaactgcagc

SEQ ID NO: 7310 - DNA, 201 bp, Homo sapiens
tacaagcagtaagatgttcagcaggtattactggtacaaatgtagtaaagaagtgtcagggaggcagctgttacaccaaaagatgcacattcaataaagtwacaggactctatgaaaaaggatgtgagtttgttctccaatcccgccagacggagaaggcttctataatgtttgcacaacatgttgattctatagttgaat

SEQ ID NO: 7311 - DNA, 201 bp, Homo sapiens
ttaaagacctgtgataaaccacttccgataagttggaaacgtgtgtctatattttcatatctgtatatatataatggtaaagaaagacaccttcgtaaccygcattttccaaagagagaaatcacagggagatgtacagcaatggggccatttaagagttctgtgttcatcttgattcttcaccttctagaaggggccctg

SEQ ID NO: 7312 - DNA, 201 bp, Homo sapiens
ctatgaaggcattgtcgttgcaatcgaccccaatgtgccagaagatgaaacactcattcaacaaataaaggacatggtgacccaggcatctctgtatctgyttgaagctacaggaaagcgattttatttcaaaaatgttgccattttgattcctgaaacatggaagacaaaggctgactatgtgagaccaaaacttgagac

SEQ ID NO: 7313 - DNA, 201 bp, Homo sapiens
gaagaaatatccaactgatggatctgaaattgtgctgctgacggatggggaagacaacactataagtgggtgctttaacgaggtcaaacaaagtggtgccmtcatccacacagtcgctttggggccctctgcagctcaagaactagaggagctgtccaaaatgacaggaggtttacagacatatgcttcagatcaagttca

SEQ ID NO: 7314 - DNA, 201 bp, Homo sapiens
ccacttccgataagttggaaacgtgtgtctatattttcatatctgtatatatataatggtaaagaaagacaccttcgtaacccgcattttccaaagagagraatcacagggagatgtacagcaatggggccatttaagagttctgtgttcatcttgattcttcaccttctagaaggggccctgagtaattcactcattcag

SEQ ID NO: 7315 - DNA, 201 bp, Homo sapiens
tttactgtgattaggaagaaatatccaactgatggatctgaaattgtgctgctgacggatggggaagacaacactataagtgggtgctttaacgaggtcaracaaagtggtgccatcatccacacagtcgctttggggccctctgcagctcaagaactagaggagctgtccaaaatgacaggaggtttacagacatatgct

SEQ ID NO: 7316 - DNA, 201 bp, Homo sapiens
ctgtgattaggaagaaatatccaactgatggatctgaaattgtgctgctgacggatggggaagacaacactataagtgggtgctttaacgaggtcaaacawagtggtgccatcatccacacagtcgctttggggccctctgcagctcaagaactagaggagctgtccaaaatgacaggaggtttacagacatatgcttcag

SEQ ID NO: 7317 - DNA, 201 bp, Homo sapiens
  misc_feature (101)..(101): n is a, c, g, or t
ctatgacaacacagccaccaaatcccaccttctcattgctgcagattggacaaagaattgtgtgtttagtccttgacaaatctggaagcatggcgactggnaaccgcctcaatcgactgaatcaagcaggccagcttttcctgctgcagacagttgagctggggtcctgggttgggatggtgacatttgacagtgctgccc

SEQ ID NO: 7318 - DNA, 201 bp, Homo sapiens
cagttaccttggaactactggataatggagcaggtgctgatgctactaaggatgacggtgtctactcaaggtatttcacaacttatgacacgaatggtagrtacagtgtaaaagtgcgggctctgggaggagttaacgcagccagacggagagtgataccccagcagagtggagcactgtacatacctggctggattgaga

SEQ ID NO: 7319 - DNA, 201 bp, Homo sapiens
actgagcagatgggcaactgtggagagaagggtgaaaggatccacctcactcctgatttcattgcaggaaaaaagttagctgaatatggaccacaaggtarggcatttgtccatgagtgggctcatctacgatggggagtatttgacgagtacaataatgatgagaaattctacttatccaatggaagaatacaagcagta

SEQ ID NO: 7320 - DNA, 201 bp, Homo sapiens
gaagaggtgttgaggttatgtcaagcatctggcacagctgaaggcagatggaaatatttacaagtacgcaatttgagactaagatattgttatcattctcytattgaagacaagagcaatagtaaaacacatcaggtcagggggttaaagacctgtgataaaccacttccgataagttggaaacgtgtgtctatattttca

SEQ ID NO: 7321 - DNA, 201 bp, Homo sapiens
aatcgactgaatcaagcaggccagcttttcctgctgcagacagttgagctggggtcctgggttgggatggtgacatttgacagtgctgcccatgtacaaartgaactcatacagataaacagtggcagtgacagggacacactcgccaaaagattacctgcagcagcttcaggagggacgtccatctgcagcgggcttcga

SEQ ID NO: 7322 - DNA, 201 bp, Homo sapiens
gtttcagcagaacatcctcgggaggctcatttgtggcttctgatgtcccaaatgctcccatacctgatctcttcccacctggccaaatcaccgacctgaakgcggaaattcacgggggcagtctcattaatctgacttggacagctcctggggatgattatgaccatggaacagctcacaagtatatcattcgaataagta

SEQ ID NO: 7323 - DNA, 201 bp, Homo sapiens
attatgaccatggaacagctcacaagtatatcattcgaataagtacaagtattcttgatctcagagacaagttcaatgaatctcttcaagtgaatactacygctctcatcccaaaggaagccaactctgaggaagtctttttgtttaaaccagaaaacattacttttgaaaatggcacagatcttttcattgctattcagg

SEQ ID NO: 7324 - DNA, 201 bp, Homo sapiens
agtaagggattaaccctccagaacagccagtggatgaatggcacagtgatcgtggacagcaccgtgggaaaggacactttgtttcttatcacctggacaaygcagcctccccaaatccttctctgggatcccagtggacagaagcaaggtggctttgtagtggacaaaaacaccaaaatggcctacctccaaatcccaggc

SEQ ID NO: 7325 - DNA, 201 bp, Homo sapiens
agccctgattgaatcagtgaatggaaaaacagttaccttggaactactggataatggagcaggtgctgatgctactaaggatgacggtgtctactcaaggyatttcacaacttatgacacgaatggtagatacagtgtaaaagtgcgggctctgggaggagttaacgcagccagacggagagtgataccccagcagagtgg

SEQ ID NO: 7326 - DNA, 201 bp, Homo sapiens
aaaagattacctgcagcagcttcaggagggacgtccatctgcagcgggcttcgatcggcatttactgtgattaggaagaaatatccaactgatggatctgwaattgtgctgctgacggatggggaagacaacactataagtgggtgctttaacgaggtcaaacaaagtggtgccatcatccacacagtcgctttggggccc

SEQ ID NO: 7327 - DNA, 201 bp, Homo sapiens
ctgatggatctgaaattgtgctgctgacggatggggaagacaacactataagtgggtgctttaacgaggtcaaacaaagtggtgccatcatccacacagtygctttggggccctctgcagctcaagaactagaggagctgtccaaaatgacaggaggtttacagacatatgcttcagatcaagttcagaacaatggcctca

SEQ ID NO: 7328 - DNA, 201 bp, Homo sapiens
ccaccacctcctcctcctcccctaccacctgggcagccagtccctactgctggatatcctgcctctggtcatcctgtcagccagcctgtgctccagcagcmgggatatattcagcagccatcaccacagatgccagcctgttattgcgctccaggccactatcactccagccaacctcagtatcgcccagtcccttctgtt

SEQ ID NO: 7329 - DNA, 201 bp, Homo sapiens
taaacccagatgggagtccagttgtgtataatcctcctatgactcaacaaccagttagatcccaagtgcctggacctccacagccacctctgccagccccwcctcaacaaccagcagctaatcacattttctcacagcaggataacctagggtctcagtttagccacatgagtcttgctcgccagccatctgctgatggtt

SEQ ID NO: 7330 - DNA, 201 bp, Homo sapiens
gcaggtttttctaaggaaatgccattcaaatgcctcctaacttttatagttattttgttttatatttctaaattcttgtatcagatccaaagctctattgyacagcaaattattcttcaaaatgattataaccagttgcaccctgtatttctttttgcagccagcacaatgtgacccaacttaaaatttgggggaaaaaga

SEQ ID NO: 7331 - DNA, 201 bp, Homo sapiens
tgacagaagaagcaaatctatagaagaaagagaagaagagtaccagagagccagagaccgaatattttcccaagattccctgtgttcccaagagaattacmttattgacaaaagactccaagacgaggatgccagtagtacccagcagaggcgccagatatttagagttaataaagatgcttcagggagatctacaaatag

SEQ ID NO: 7332 - DNA, 201 bp, Homo sapiens
tcatgccccaattttctagaccttttgtccccgggcaaggagattccaggtatccattacttggccagccactgcagtacaatcctcctgctgttctgcayggacacattccaaaccaacagggtcagcctggcagcaggcatggaaaccgaggaaggagacaagctaaaaaagctgcatccacagaccttggagcaggag

SEQ ID NO: 7333 - DNA, 201 bp, Homo sapiens
gaaatttaatgaacatattaaggatgataaaggtgaagactttcagaaacgttatatcctcaagagagataactctagctttgacaaagatgataaccagrtgagaatacgtttgaaagatgacagaagaagcaaatctatagaagaaagagaagaagagtaccagagagccagagaccgaatattttcccaagattccct

SEQ ID NO: 7334 - DNA, 201 bp, Homo sapiens
ggtgcagccacctgtgcttcttcacaccccacgcaacccggtgtggctgccccatcggcctggagctgctgagtgacatgaagacctgcatcgtgcctgargccttcttggtcttcaccagcagagccgccatccacaggatctccctcgagaccaataacaacgacgtggccatcccgctcacgggcgtcaaggaggcct

SEQ ID NO: 7335 - DNA, 201 bp, Homo sapiens
cggactgtgacgccatctgcctgcccaaccagttccggtgtgcgagcggccagtgtgtcctcatcaaacagcagtgcgactccttccccgactgtatcgayggctccgacgagctcatgtgtgaaatcaccaagccgccctcagacgacagcccggcccacagcagtgccatcgggcccgtcattggcatcatcctctctc

SEQ ID NO: 7336 - DNA, 201 bp, Homo sapiens
tcatgaacgggagctcggtggagcacgtggtggagtttggccttgactaccccgagggcatggccgttgactggatgggcaagaacctctactgggccgayactgggaccaacagaatcgaagtggcgcggctggacgggcagttccggcaagtcctcgtgtggagggacttggacaacccgaggtcgctggccctggatc

SEQ ID NO: 7337 - DNA, 201 bp, Homo sapiens
cagccctggactttgatgtgtccaacaaccacatctactggacagacgtcagcctgaagaccatcagccgcgccttcatgaacgggagctcggtggagcaygtggtggagtttggccttgactaccccgagggcatggccgttgactggatgggcaagaacctctactgggccgacactgggaccaacagaatcgaagtgg

SEQ ID NO: 7338 - DNA, 201 bp, Homo sapiens
gtactggacagacgtgagcgaggaggccatcaagcagacctacctgaaccagacgggggccgccgtgcagaacgtggtcatctccggcctggtctctccckacggcctcgcctgcgactgggtgggcaagaagctgtactggacggactcagagaccaaccgcatcgaggtggccaacctcaatggcacatcccggaaggt

SEQ ID NO: 7339 - DNA, 201 bp, Homo sapiens
gcgcattgagagctgtgacctgtcaggggccaaccgcctgaccctggaggacgccaacatcgtgcagcctctgggcctgaccatccttggcaagcatctcyactggatcgaccgccagcagcagatgatcgagcgtgtggagaagaccaccggggacaagcggactcgcatccagggccgtgtcgcccacctcactggcat

SEQ ID NO: 7340 - DNA, 201 bp, Homo sapiens
gatggatggcagcacccggaagatcattgtggactcggacatttactggcccaatggactgaccatcgacctggaggagcagaagctctactgggctgacrccaagctcagcttcatccaccgtgccaacctggacggctcgttccggcagaaggtggtggagggcagcctgacgcaccccttcgccctgacgctctccgg

SEQ ID NO: 7341 - DNA, 201 bp, Homo sapiens
atggatggcagcacccggaagatcattgtggactcggacatttactggcccaatggactgaccatcgacctggaggagcagaagctctactgggctgacgycaagctcagcttcatccaccgtgccaacctggacggctcgttccggcagaaggtggtggagggcagcctgacgcaccccttcgccctgacgctctccggg

SEQ ID NO: 7342 - DNA, 201 bp, Homo sapiens
caccgtgccaacctggacggctcgttccggcagaaggtggtggagggcagcctgacgcaccccttcgccctgacgctctccggggacactctgtactggayagactggcagacccgctccatccatgcctgcaacaagcgcactggggggaagaggaaggagatcctgagtgccctctactcacccatggacatccaggtg

SEQ ID NO: 7343 - DNA, 201 bp, Homo sapiens
cgaccgccagcagcagatgatcgagcgtgtggagaagaccaccggggacaagcggactcgcatccagggccgtgtcgcccacctcactggcatccatgcastggaggaagtcagcctggaggagttctcagcccacccatgtgcccgtgacaatggtggctgctcccacatctgtattgccaagggtgatgggacaccacg

SEQ ID NO: 7344 - DNA, 201 bp, Homo sapiens
gagccgtgtactggacagacgtgagcgaggaggccatcaagcagacctacctgaaccagacgggggccgccgtgcagaacgtggtcatctccggcctggtstctcccgacggcctcgcctgcgactgggtgggcaagaagctgtactggacggactcagagaccaaccgcatcgaggtggccaacctcaatggcacatccc

SEQ ID NO: 7345 - DNA, 201 bp, Homo sapiens
ccccgagccatcgcactgcaccccgtgatgggcctcatgtactggacagactggggagagaaccctaaaatcgagtgtgccaacttggatgggcaggagcrgcgtgtgctggtcaatgcctccctcgggtggcccaacggcctggccctggacctgcaggaggggaagctctactggggagacgccaagacagacaagatc

SEQ ID NO: 7346 - DNA, 201 bp, Homo sapiens
gaggcggaccctcctggaggacaagctcccgcacattttcgggttcacgctgctgggggacttcatctactggactgactggcagcgccgcagcatcgagygggtgcacaaggtcaaggccagccgggacgtcatcattgaccagctgcccgacctgatggggctcaaagctgtgaatgtggccaaggtcgtcggaaccaa

SEQ ID NO: 7347 - DNA, 201 bp, Homo sapiens
tcaccagcagagccgccatccacaggatctccctcgagaccaataacaacgacgtggccatcccgctcacgggcgtcaaggaggcctcagccctggacttygatgtgtccaacaaccacatctactggacagacgtcagcctgaagaccatcagccgcgccttcatgaacgggagctcggtggagcacgtggtggagtttg

SEQ ID NO: 7348 - DNA, 201 bp, Homo sapiens
tgcaggacaacggcaggacgtgtaaggcaggagccgaggaggtgctgctgctggcccggcggacggacctacggaggatctcgctggacacgccggacttyaccgacatcgtgctgcaggtggacgacatccggcacgccattgccatcgactacgacccgctagagggctatgtctactggacagatgacgaggtgcggg

SEQ ID NO: 7349 - DNA, 201 bp, Homo sapiens
gctcggtggagcacgtggtggagtttggccttgactaccccgagggcatggccgttgactggatgggcaagaacctctactgggccgacactgggaccaayagaatcgaagtggcgcggctggacgggcagttccggcaagtcctcgtgtggagggacttggacaacccgaggtcgctggccctggatcccaccaagggct

SEQ ID NO: 7350 - DNA, 201 bp, Homo sapiens
gctgagtgacatgaagacctgcatcgtgcctgaggccttcttggtcttcaccagcagagccgccatccacaggatctccctcgagaccaataacaacgacrtggccatcccgctcacgggcgtcaaggaggcctcagccctggactttgatgtgtccaacaaccacatctactggacagacgtcagcctgaagaccatcag

SEQ ID NO: 7351 - DNA, 201 bp, Homo sapiens
tcagcgggaccccgcacgtgcccctcaatttcatagccccgggcggttcccagcatggccccttcacaggcatcgcatgcggaaagtccatgatgagctcygtgagcctgatggggggccggggcggggtgcccctctacgaccggaaccacgtcacaggggcctcgtccagcagctcgtccagcacgaaggccacgctgt

SEQ ID NO: 7352 - DNA, 201 bp, Homo sapiens
agcatggccccttcacaggcatcgcatgcggaaagtccatgatgagctccgtgagcctgatggggggccggggcggggtgcccctctacgaccggaaccaygtcacaggggcctcgtccagcagctcgtccagcacgaaggccacgctgtacccgccgatcctgaacccgccgccctccccggccacggacccctccctgt

SEQ ID NO: 7353 - DNA, 201 bp, Homo sapiens
gtgtgctccgccgcccagttcccctgcgcgcggggtcagtgtgtggacctgcgcctgcgctgcgacggcgaggcagactgtcaggaccgctcagacgaggyggactgtgacgccatctgcctgcccaaccagttccggtgtgcgagcggccagtgtgtcctcatcaaacagcagtgcgactccttccccgactgtatcgac

SEQ ID NO: 7354 - DNA, 201 bp, Homo sapiens
tggcatcgcggtcgactgggtggcccgaaacctctactggaccgacacgggcacggaccgcatcgaggtgacgcgcctcaacggcacctcccgcaagatcytggtgtcggaggacctggacgagccccgagccatcgcactgcaccccgtgatgggcctcatgtactggacagactggggagagaaccctaaaatcgagtg

SEQ ID NO: 7355 - DNA, 201 bp, Homo sapiens
gcgacaagcccagggccatcgtcgtcaacgcggagcgagggtacctgtacttcaccaacatgcaggaccgggcagccaagatcgaacgcgcagccctggayggcaccgagcgcgaggtcctcttcaccaccggcctcatccgccctgtggccctggtggtggacaacacactgggcaagctgttctgggtggacgcggacc

SEQ ID NO: 7356 - DNA, 201 bp, Homo sapiens
gtatccccggggcctggcgctgtgacggctttcccgagtgcgatgaccagagcgacgaggagggctgccccgtgtgctccgccgcccagttcccctgcgcrcggggtcagtgtgtggacctgcgcctgcgctgcgacggcgaggcagactgtcaggaccgctcagacgaggcggactgtgacgccatctgcctgcccaacc

SEQ ID NO: 7357 - DNA, 201 bp, Homo sapiens
acgctgtacccgccgatcctgaacccgccgccctccccggccacggacccctccctgtacaacatggacatgttctactcttcaaacattccggccactgygagaccgtacaggccctacatcattcgaggaatggcgcccccgacgacgccctgcagcaccgacgtgtgtgacagcgactacagcgccagccgctggaag

SEQ ID NO: 7358 - DNA, 201 bp, Homo sapiens
tgcaggaccgggcagccaagatcgaacgcgcagccctggacggcaccgagcgcgaggtcctcttcaccaccggcctcatccgccctgtggccctggtggtrgacaacacactgggcaagctgttctgggtggacgcggacctgaagcgcattgagagctgtgacctgtcaggggccaaccgcctgaccctggaggacgcca

SEQ ID NO: 7359 - DNA, 201 bp, Homo sapiens
agctctactggggagacgccaagacagacaagatcgaggtgatcaatgttgatgggacgaagaggcggaccctcctggaggacaagctcccgcacattttygggttcacgctgctgggggacttcatctactggactgactggcagcgccgcagcatcgagcgggtgcacaaggtcaaggccagccgggacgtcatcattg

SEQ ID NO: 7360 - DNA, 201 bp, Homo sapiens; identical to SEQ ID NO: 7334

SEQ ID NO: 7361 - DNA, 201 bp, Homo sapiens; identical to SEQ ID NO: 7335

SEQ ID NO: 7362 - DNA, 201 bp, Homo sapiens; identical to SEQ ID NO: 7336

SEQ ID NO: 7363 - DNA, 201 bp, Homo sapiens; identical to SEQ ID NO: 7337

SEQ ID NO: 7364 - DNA, 201 bp, Homo sapiens; identical to SEQ ID NO: 7338

SEQ ID NO: 7365 - DNA, 201 bp, Homo sapiens; identical to SEQ ID NO: 7339

SEQ ID NO: 7366 - DNA, 201 bp, Homo sapiens; identical to SEQ ID NO: 7340

SEQ ID NO: 7367 - DNA, 201 bp, Homo sapiens; identical to SEQ ID NO: 7341

SEQ ID NO: 7368 - DNA, 201 bp, Homo sapiens; identical to SEQ ID NO: 7342

SEQ ID NO: 7369 - DNA, 201 bp, Homo sapiens; identical to SEQ ID NO: 7343

SEQ ID NO: 7370 - DNA, 201 bp, Homo sapiens; identical to SEQ ID NO: 7344

SEQ ID NO: 7371 - DNA, 201 bp, Homo sapiens; identical to SEQ ID NO: 7345

SEQ ID NO: 7372 - DNA, 201 bp, Homo sapiens; identical to SEQ ID NO: 7346

SEQ ID NO: 7373 - DNA, 201 bp, Homo sapiens; identical to SEQ ID NO: 7347

SEQ ID NO: 7374 - DNA, 201 bp, Homo sapiens; identical to SEQ ID NO: 7348

SEQ ID NO: 7375 - DNA, 201 bp, Homo sapiens; identical to SEQ ID NO: 7349

SEQ ID NO: 7376 - DNA, 201 bp, Homo sapiens; identical to SEQ ID NO: 7350

SEQ ID NO: 7377 - DNA, 201 bp, Homo sapiens; identical to SEQ ID NO: 7351

SEQ ID NO: 7378 - DNA, 201 bp, Homo sapiens; identical to SEQ ID NO: 7352

SEQ ID NO: 7379 - DNA, 201 bp, Homo sapiens; identical to SEQ ID NO: 7353

SEQ ID NO: 7380 - DNA, 201 bp, Homo sapiens; identical to SEQ ID NO: 7354

SEQ ID NO: 7381 - DNA, 201 bp, Homo sapiens; identical to SEQ ID NO: 7355

SEQ ID NO: 7382 - DNA, 201 bp, Homo sapiens; identical to SEQ ID NO: 7356

SEQ ID NO: 7383 - DNA, 201 bp, Homo sapiens; identical to SEQ ID NO: 7357

SEQ ID NO: 7384 - DNA, 201 bp, Homo sapiens; identical to SEQ ID NO: 7358

SEQ ID NO: 7385 - DNA, 201 bp, Homo sapiens; identical to SEQ ID NO: 7359

SEQ ID NO: 7386 - DNA, 201 bp, Homo sapiens
taggttataaaagacactgcagcttctacttgagccctctctctctgccacccaccgcccccaatctatcttggctcactcgctctgggggaagctagctkccatgctatgagcaggcctataaagagacttacgtggtaaaaaatgaagtctcctgcccacagccacattagtgaacctagaagcagagactctgtgaga

SEQ ID NO: 7387 - DNA, 201 bp, Homo sapiens
gccctctctctctgccacccaccgcccccaatctatcttggctcactcgctctgggggaagctagctgccatgctatgagcaggcctataaagagacttaygtggtaaaaaatgaagtctcctgcccacagccacattagtgaacctagaagcagagactctgtgagataatcgatgtttgttgttttaagttgctcagtt

SEQ ID NO: 7388 - DNA, 201 bp, Homo sapiens
tggaggagacccatggcggacaatcactctctctgctctcaggacccccacgtctgacttagtgggcacctgaccactttgtcttctggttcccagtttgsataaattctgagatttggagctcagtccacggtcctcccccactggatggtgctactgctgtggaaccttgtaaaaaccatgtggggtaaactgggaata

SEQ ID NO: 7389 - DNA, 201 bp, Homo sapiens
tgatttttcttttaattctgttaatttatctgtatttcctaatttttctacaatgaagatgaattccttgtataaaaataagaaaagaaattaatcttgasgtaagcagagcagacatcatctctgattgtcctcagcctccacttccccagagtaaattcaaattgaatcgagctctgctgctctggttggttgtagtag

SEQ ID NO: 7390 - DNA, 201 bp, Homo sapiens
ctctgctctcaggacccccacgtctgacttagtgggcacctgaccactttgtcttctggttcccagtttggataaattctgagatttggagctcagtccasggtcctcccccactggatggtgctactgctgtggaaccttgtaaaaaccatgtggggtaaactgggaataacatgaaaagatttctgtgggggtggggtg

SEQ ID NO: 7391 - DNA, 201 bp, Homo sapiens
cagacatcatctctgattgtcctcagcctccacttccccagagtaaattcaaattgaatcgagctctgctgctctggttggttgtagtagtgatcaggaawcagatctcagcaaagccactgaggaggaggctgtgctgagtttgtgtggctggaatctctgggtaaggaacttaaagaacaaaaatcatctggtaattct

SEQ ID NO: 7392 - DNA, 201 bp, Homo sapiens
cccactggatggtgctactgctgtggaaccttgtaaaaaccatgtggggtaaactgggaataacatgaaaagatttctgtgggggtggggtgggggagtgstgggaatcattcctgcttaatggtaactgacaagtgttaccctgagccccgcaggccaacccatccccagttgagccttatagggtcagtagctctccac

SEQ ID NO: 7393 - DNA, 201 bp, Homo sapiens
acgtgccccccagaactccctgggcagagccagctcgggtgaggggtgagtggaggagacccatggcggacaatcactctctctgctctcaggacccccasgtctgacttagtgggcacctgaccactttgtcttctggttcccagtttggataaattctgagatttggagctcagtccacggtcctcccccactggatgg

SEQ ID NO: 7394 - DNA, 201 bp, Homo sapiens
aagctaagaaacaccaaggattgtggcaaccatcagaagcttggaagaggcaaagaagaattcttccctagaggctttagagggataacggctctgctgamaccttaatctcagacttccagcctcctgaacgaagaaagaataaatttcggctgttttaagccaccaaggataattggttacagcagctctaggaaacta

SEQ ID NO: 7395 - DNA, 201 bp, Homo sapiens
ttttctacaatgaagatgaattccttgtataaaaataagaaaagaaattaatcttgaggtaagcagagcagacatcatctctgattgtcctcagcctccamttccccagagtaaattcaaattgaatcgagctctgctgctctggttggttgtagtagtgatcaggaaacagatctcagcaaagccactgaggaggaggct

SEQ ID NO: 7396 - DNA, 201 bp, Homo sapiens
gtagttagttaagacaaggtcatgctggatgaaggtagacctaaattcaatatgactggtttccttgtatgaaaaggagaggacacagagacagaggagaygcggggaagactatgtaaagatgaaggcagagatcggagttttgcagccacaagctaagaaacaccaaggattgtggcaaccatcagaagcttggaagag

SEQ ID NO: 7397 - DNA, 201 bp, Homo sapiens
taactgacaagtgttaccctgagccccgcaggccaacccatccccagttgagccttatagggtcagtagctctccacatgaagtcctgtcactcaccactrtgcaggagagggaggtggtcatagagtcagggatctatggcccttggcccagccccacccccttccctttaatcctgccactgtcatatgctacctttcc

SEQ ID NO: 7398 - DNA, 201 bp, Homo sapiens
acctgaccactttgtcttctggttcccagtttggataaattctgagatttggagctcagtccacggtcctcccccactggatggtgctactgctgtggaaycttgtaaaaaccatgtggggtaaactgggaataacatgaaaagatttctgtgggggtggggtgggggagtggtgggaatcattcctgcttaatggtaact

SEQ ID NO: 7399 - DNA, 201 bp, Homo sapiens
ccttccctttaatcctgccactgtcatatgctacctttcctatctcttccctcatcatcttgttgtgggcatgaggaggtggtgatgtcagaagaaatggytcgagctcagaagataaaagataagtagggtatgctgatcctcttttaaaaacccaagatacaatcaaaatcccagatgctggtctctattcccatgaaa

SEQ ID NO: 7400 - DNA, 201 bp, Homo sapiens
gtaaaaaccatgtggggtaaactgggaataacatgaaaagatttctgtgggggtggggtgggggagtggtgggaatcattcctgcttaatggtaactgacmagtgttaccctgagccccgcaggccaacccatccccagttgagccttatagggtcagtagctctccacatgaagtcctgtcactcaccactgtgcaggag

SEQ ID NO: 7401 - DNA, 201 bp, Homo sapiens
ggtcagtagctctccacatgaagtcctgtcactcaccactgtgcaggagagggaggtggtcatagagtcagggatctatggcccttggcccagccccaccyccttccctttaatcctgccactgtcatatgctacctttcctatctcttccctcatcatcttgttgtgggcatgaggaggtggtgatgtcagaagaaatgg

SEQ ID NO: 7402 - DNA, 201 bp, Homo sapiens
tatttctttatagaaaaaagtctggaagagtttacttcaattgtagcaatgtcagggtggtggcagtataggtgatttttcttttaattctgttaatttayctgtatttcctaatttttctacaatgaagatgaattccttgtataaaaataagaaaagaaattaatcttgaggtaagcagagcagacatcatctctgatt

SEQ ID NO: 7403 - DNA, 201 bp, Homo sapiens
ccttggcccagccccacccccttccctttaatcctgccactgtcatatgctacctttcctatctcttccctcatcatcttgttgtgggcatgaggaggtgstgatgtcagaagaaatggctcgagctcagaagataaaagataagtagggtatgctgatcctcttttaaaaacccaagatacaatcaaaatcccagatgct

SEQ ID NO: 7404 - DNA, 201 bp, Homo sapiens
ggataacggctctgctgaaaccttaatctcagacttccagcctcctgaacgaagaaagaataaatttcggctgttttaagccaccaaggataattggttayagcagctctaggaaactaatacagctgctaaaatgatccctgtctcctcgtgtttacattctgtgtgtgtcccctcccacaatgtaccaaagttgtcttt

SEQ ID NO: 7405 - DNA, 201 bp, Homo sapiens
ctgaagccgatcagcctgtcagactcacccagcttcccgagaatggtggctggaatgcccccatcacagacttctacttccagcagtgtgactagggcaaygtgccccccagaactccctgggcagagccagctcgggtgaggggtgagtggaggagacccatggcggacaatcactctctctgctctcaggacccccacg

SEQ ID NO: 7406 - DNA, 201 bp, Homo sapiens
ttggtgccaaggaatccaagagcttcaccttctaccggcgggacatggggctcacctccagcttcgagtcggctgcctacccgggctggttcctgtgcacsgtgcctgaagccgatcagcctgtcagactcacccagcttcccgagaatggtggctggaatgcccccatcacagacttctacttccagcagtgtgactagg

SEQ ID NO: 7407 - DNA, 201 bp, Homo sapiens
gataacggctctgctgaaaccttaatctcagacttccagcctcctgaacgaagaaagaataaatttcggctgttttaagccaccaaggataattggttacrgcagctctaggaaactaatacagctgctaaaatgatccctgtctcctcgtgtttacattctgtgtgtgtcccctcccacaatgtaccaaagttgtctttg

SEQ ID NO: 7408 - DNA, 201 bp, Homo sapiens
ctcagtccacggtcctcccccactggatggtgctactgctgtggaaccttgtaaaaaccatgtggggtaaactgggaataacatgaaaagatttctgtggrggtggggtgggggagtggtgggaatcattcctgcttaatggtaactgacaagtgttaccctgagccccgcaggccaacccatccccagttgagccttata

SEQ ID NO: 7409 - DNA, 201 bp, Homo sapiens
tcctgcttaatggtaactgacaagtgttaccctgagccccgcaggccaacccatccccagttgagccttatagggtcagtagctctccacatgaagtcctstcactcaccactgtgcaggagagggaggtggtcatagagtcagggatctatggcccttggcccagccccacccccttccctttaatcctgccactgtcat

SEQ ID NO: 7410 - DNA, 201 bp, Homo sapiens
tcattcctgcttaatggtaactgacaagtgttaccctgagccccgcaggccaacccatccccagttgagccttatagggtcagtagctctccacatgaagwcctgtcactcaccactgtgcaggagagggaggtggtcatagagtcagggatctatggcccttggcccagccccacccccttccctttaatcctgccactg

SEQ ID NO: 7411 - DNA, 201 bp, Homo sapiens
cccagagtaaattcaaattgaatcgagctctgctgctctggttggttgtagtagtgatcaggaaacagatctcagcaaagccactgaggaggaggctgtgmtgagtttgtgtggctggaatctctgggtaaggaacttaaagaacaaaaatcatctggtaattctttcctagaaggatcacagcccctgggattccaaggc

SEQ ID NO: 7412 - DNA, 201 bp, Homo sapiens
ttaattctgttaatttatctgtatttcctaatttttctacaatgaagatgaattccttgtataaaaataagaaaagaaattaatcttgaggtaagcagagyagacatcatctctgattgtcctcagcctccacttccccagagtaaattcaaattgaatcgagctctgctgctctggttggttgtagtagtgatcaggaaa

SEQ ID NO: 7413 - DNA, 184 bp, Homo sapiens
ctatgagcaggcctataaagagacttacgtggtaaaaaatgaagtctcctgcccacagccacattagtgaacctagaagcagagactctgtgagataatcratgtttgttgttttaagttgctcagttttggtctaacttgttatgcagcaatagataaataatatgcagagaaagagaaacaa

SEQ ID NO: 7414 - DNA, 201 bp, Homo sapiens; identical to SEQ ID NO: 7386

SEQ ID NO: 7415 - DNA, 201 bp, Homo sapiens; identical to SEQ ID NO: 7387

SEQ ID NO: 7416 - DNA, 201 bp, Homo sapiens; identical to SEQ ID NO: 7388

SEQ ID NO: 7417 - DNA, 201 bp, Homo sapiens; identical to SEQ ID NO: 7389

SEQ ID NO: 7418 - DNA, 201 bp, Homo sapiens; identical to SEQ ID NO: 7390

SEQ ID NO: 7419 - DNA, 201 bp, Homo sapiens; identical to SEQ ID NO: 7391

SEQ ID NO: 7420 - DNA, 201 bp, Homo sapiens; identical to SEQ ID NO: 7392

SEQ ID NO: 7421 - DNA, 201 bp, Homo sapiens; identical to SEQ ID NO: 7394

SEQ ID NO: 7422 - DNA, 201 bp, Homo sapiens; identical to SEQ ID NO: 7393

SEQ ID NO: 7423 - DNA, 201 bp, Homo sapiens; identical to SEQ ID NO: 7395

SEQ ID NO: 7424 - DNA, 201 bp, Homo sapiens; identical to SEQ ID NO: 7396

SEQ ID NO: 7425 - DNA, 201 bp, Homo sapiens; identical to SEQ ID NO: 7397

SEQ ID NO: 7426 - DNA, 201 bp, Homo sapiens; identical to SEQ ID NO: 7398

SEQ ID NO: 7427 - DNA, 201 bp, Homo sapiens; identical to SEQ ID NO: 7399

SEQ ID NO: 7428 - DNA, 201 bp, Homo sapiens; identical to SEQ ID NO: 7400

SEQ ID NO: 7429 - DNA, 201 bp, Homo sapiens; identical to SEQ ID NO: 7401

SEQ ID NO: 7430 - DNA, 201 bp, Homo sapiens; identical to SEQ ID NO: 7402

SEQ ID NO: 7431 - DNA, 201 bp, Homo sapiens; identical to SEQ ID NO: 7403

SEQ ID NO: 7432 - DNA, 201 bp, Homo sapiens; identical to SEQ ID NO: 7404

SEQ ID NO: 7433 - DNA, 201 bp, Homo sapiens; identical to SEQ ID NO: 7405

SEQ ID NO: 7434 - DNA, 201 bp, Homo sapiens; identical to SEQ ID NO: 7406

SEQ ID NO: 7435 - DNA, 201 bp, Homo sapiens; identical to SEQ ID NO: 7407

SEQ ID NO: 7436 - DNA, 201 bp, Homo sapiens; identical to SEQ ID NO: 7408

SEQ ID NO: 7437 - DNA, 201 bp, Homo sapiens; identical to SEQ ID NO: 7409

SEQ ID NO: 7438 - DNA, 201 bp, Homo sapiens; identical to SEQ ID NO: 7410

SEQ ID NO: 7439 - DNA, 201 bp, Homo sapiens; identical to SEQ ID NO: 7411

SEQ ID NO: 7440 - DNA, 201 bp, Homo sapiens; identical to SEQ ID NO: 7412

SEQ ID NO: 7441 - DNA, 184 bp, Homo sapiens; identical to SEQ ID NO: 7413

SEQ ID NO: 7442 - DNA, 134 bp, Homo sapiens
gacacgggttcctccccactctgtctttctcacytctccttcacttttcctagcctcctcaccaccatctgatctatcttgttctcttcacaaaaggctctgaagacatcatgaacccacaacgggaggcagca

SEQ ID NO: 7443 - DNA, 181 bp, Homo sapiens
gacacgggttcctccccactctgtctttctcacctctccttcacttttcctagcctcctcaccaccatctgatctatcttrttctcttcacaaaaggctctgaagacatcatgaacccacaacgggaggcagcacccaaatcctatgctattcgtgattctcgacagatggtgtgggtcct

SEQ ID NO: 7444 - DNA, 201 bp, Homo sapiens
ggttttcatgaaaaatgggaagatcagacaacattgctcctgaattcccacagagcagcaagctactagagctcaatctgttatttcttttcctgatgtayaggggttaagtcctatggaagaaacagcagaattattcaaaattatttacataatgtgcaattattcactagagcatgaggagtgaaacgctctgtttag

SEQ ID NO: 7445 - DNA, 201 bp, Homo sapiens
tagagaaggtcggagtctttttaggagtagatttggactacataacctgtaaatgtgttttgtccagtccttagagtgttttttaaaaaattgtaaagtcraggttttcatgaaaaatgggaagatcagacaacattgctcctgaattcccacagagcagcaagctactagagctcaatctgttatttcttttcctgatgt

SEQ ID NO: 7446 - DNA, 201 bp, Homo sapiens
gaaatttttctcttttcttgggttctggagagtttgtaaaacaaggacactatgtatttttaaagagttggtaaatcttacctgtaaagctagagaaggtyggagtctttttaggagtagatttggactacataacctgtaaatgtgttttgtccagtccttagagtgttttttaaaaaattgtaaagtcaaggttttcat

SEQ ID NO: 7447 - DNA, 134 bp, Homo sapiens; identical to SEQ ID NO: 7442

SEQ ID NO: 7448 - DNA, 173 bp, Homo sapiens
tcactcgaatgtcactatcccaagatgaaacctaaaaatcactttccattctttcttgatcttaccccaccatccactcagctgccatgcccagtttagtyaaccccccaaatgctgcttcatgcaaccttccattcctattccttttgccaacccatgatgtagagatgtgg

SEQ ID NO: 7449 - DNA, 181 bp, Homo sapiens; identical to SEQ ID NO: 7443

SEQ ID NO: 7450 - DNA, 201 bp, Homo sapiens
ctcattcttactatccaaaagccacctcctcctccaaacatccatttctgtaccaagaccctcactcgaatgtcactatcccaagatgaaacctaaaaatyactttccattctttcttgatcttaccccaccatccactcagctgccatgcccagtttagtcaaccccccaaatgctgcttcatgcaaccttccattccta

SEQ ID NO: 7451 - DNA, 201 bp, Homo sapiens
caggagagcagccatgtgcagcagcaggcccttgctctggagcagcagttcttggagcgcacccaggcgctagaagcccagatagtggccctggagagaaygcgggcagctgaccagaccaccgcagagcaagggatgagacaactggagcaagaaaatgcagcccttaaagaatgcaggaatgaatatgaacgttcttta

SEQ ID NO: 7452 - DNA, 201 bp, Homo sapiens
tatcacacatttgcaagagaaggttgcatccttggagaagagactagaacagaacttatcaggagaagaacacgtgcaagaactcctgaaagagaaaacayttgctgagcagaatttggaggataccagacaacagctcttggcagccagaagcagccaggctaaggccattaacaccctggagactcgggtgagagaact

SEQ ID NO: 7453 - DNA, 201 bp, Homo sapiens
tgctgaaactcaagagaaagaagacgttatcacacatttgcaagagaaggttgcatccttggagaagagactagaacagaacttatcaggagaagaacacktgcaagaactcctgaaagagaaaacacttgctgagcagaatttggaggataccagacaacagctcttggcagccagaagcagccaggctaaggccattaa

SEQ ID NO: 7454 - DNA, 201 bp, Homo sapiens
ctcgggtgagagaactggagcagaccttgcaggcctctgaggagcagctccaacagagcaagggcattgtggctgcccaggaaactcagatacaggagctsgctgccgccaaccaggagagcagccatgtgcagcagcaggcccttgctctggagcagcagttcttggagcgcacccaggcgctagaagcccagatagtgg

SEQ ID NO: 7455 - DNA, 201 bp, Homo sapiens
tgaatgtacttgtcttggataggttgctggtaaaccattttaaactattttttatagctgaagttcttcactactataaacatgtcttctgtactataaawtccatttaactggtgttcttaaaatcagagcgtccagaggaaattcttcctaaaactaggattcctgttcctttgtcttctcactcgcactctggcactg

SEQ ID NO: 7456 - DNA, 201 bp, Homo sapiens
aaatgcagcccttaaagaatgcaggaatgaatatgaacgttctttacaaaatcaccaatttgaactaaagaagctgaaggaagaatggagccaaagagaarttgtgagcgtggccatggctcaagccctggaggaggtgcggaagcaaagggaagagttccagcaacaggcagctaacctgacagccataatagacgagaa

SEQ ID NO: 7457 - DNA, 201 bp, Homo sapiens
tcagatgagttagaagctttttatcccttcctctcaagaaaatattctttcaccctgtctctcaaaccacctagaactttagaggatccatctttaagggycggtgtggatgaatgagaaaatgcacctttctgacagtatctccactttacttaagaaaactagcaaatatatgaaaagacccttagtaccaaatacact

SEQ ID NO: 7458 - DNA, 201 bp, Homo sapiens
tgctgaggctgcggggcccattgcaggccgaagcactctcagtcaatgagtcgcacgtgacctcgagggccatgcaggaccctgtgttccagcttccaackgcaggaagaacaccaaatggtgaggttggggccatggatctcacacagctacagaaggagaaacaggacttggagcagcaacttctggagaaaaataaga

SEQ ID NO: 7459 - DNA, 201 bp, Homo sapiens
tgcgctgccgctgggcgatgcagaccacctgtcttctactgaaggacagtccgctgtctccagtgggggcagcagctgtcccccagcctcgatggagacaytggggcagtctgccttgtctgtggagctgctctctctccctcatcccaccccaaatacttaaaatgacactacacccagacggcgcccagctggctgcag

SEQ ID NO: 7460 - DNA, 201 bp, Homo sapiens
tgcaggccgagctggaggccctgaggaccctcaaggcggaggaggctgcagtggtcgcggagcaggaggacctgctgaggctgcggggcccattgcaggcygaagcactctcagtcaatgagtcgcacgtgacctcgagggccatgcaggaccctgtgttccagcttccaactgcaggaagaacaccaaatggtgaggttg

SEQ ID NO: 7461 - DNA, 201 bp, Homo sapiens
tttcaaagtaggatttcctttttcaactgttccaggaaagaatctctaagactgggtagctcacagccagccaaaggcagctacatttccacagaagcccrtccgctgcctccgtggcttctccagccattgaactggtcccacacgcaccccaggccccactcctcggcagtttcaggtgtagctgtggggcccgttcct

SEQ ID NO: 7462 - DNA, 201 bp, Homo sapiens
taagaggaagagtggaataaatattctaagtgatttaatgcactttgacttgtataaaactttctgtgttagcgacggtatctatagccctttatacgagygatggatcttgagctctccttccatgttgtaaatagggattgtattcttgaaaactgctgtagcaaattcatctgtggtgcaatacactttttgattaaa

SEQ ID NO: 7463 - DNA, 201 bp, Homo sapiens
aagggccggtgtggatgaatgagaaaatgcacctttctgacagtatctccactttacttaagaaaactagcaaatatatgaaaagacccttagtaccaaawacactcaattgcctttttaatgaatgtacttgtcttggataggttgctggtaaaccattttaaactattttttatagctgaagttcttcactactataaa

SEQ ID NO: 7464 - DNA, 201 bp, Homo sapiens
atgcttttaaaaaaagaagaaagtctagggaaaatggaacaagaattggaggcacgaaccagagaacttagtcgtacccaggaggagttgatgaactccartcagatgtcatcagacttaagccagaagctagaagaattgcagagacactactcaacgctggaagagcagagagatcatgtgatagcttcaaaaacaggt

SEQ ID NO: 7465 - DNA, 201 bp, Homo sapiens
tgtcttgtcgcgaatccgaggcttttcatcttataaaagctgtgtcagtgttgctgaacttttcccaagaggaggagaacatgctcaaggaaactctggartataagatgtcatggtttgggtccaaaccagctcccaagggcagcatccggccgtctatctcaaaccctcggataccatggtcctagaggggactaccca

SEQ ID NO: 7466 - DNA, 201 bp, Homo sapiens; identical to SEQ ID NO: 7451

SEQ ID NO: 7467 - DNA, 201 bp, Homo sapiens; identical to SEQ ID NO: 7452

SEQ ID NO: 7468 - DNA, 201 bp, Homo sapiens; identical to SEQ ID NO: 7453

SEQ ID NO: 7469 - DNA, 201 bp, Homo sapiens; identical to SEQ ID NO: 7454

SEQ ID NO: 7470 - DNA, 201 bp, Homo sapiens; identical to SEQ ID NO: 7455

SEQ ID NO: 7471 - DNA, 201 bp, Homo sapiens; identical to SEQ ID NO: 7456

SEQ ID NO: 7472 - DNA, 201 bp, Homo sapiens; identical to SEQ ID NO: 7457

SEQ ID NO: 7473 - DNA, 201 bp, Homo sapiens; identical to SEQ ID NO: 7458

SEQ ID NO: 7474 - DNA, 201 bp, Homo sapiens; identical to SEQ ID NO: 7459

SEQ ID NO: 7475 - DNA, 201 bp, Homo sapiens; identical to SEQ ID NO: 7460

SEQ ID NO: 7476 - DNA, 201 bp, Homo sapiens; identical to SEQ ID NO: 7461

SEQ ID NO: 7477 - DNA, 201 bp, Homo sapiens; identical to SEQ ID NO: 7462

SEQ ID NO: 7478 - DNA, 201 bp, Homo sapiens; identical to SEQ ID NO: 7463

SEQ ID NO: 7479 - DNA, 201 bp, Homo sapiens; identical to SEQ ID NO: 7464

SEQ ID NO: 7480 - DNA, 201 bp, Homo sapiens; identical to SEQ ID NO: 7465

SEQ ID NO: 7481 - DNA, 201 bp, Homo sapiens
cgccgtggctgcggccgaggtgactgtggaggacgctgaggcgctgccggcagccgcgggagagcaggagcctcggggtccggaaccagacgatgagacakagttgcgaccgcgcggcaggtcattagtaattatcagcactttagatgggagaattgctgccttggatcctgaaaatcatggtaaaaagcagtgggattt

SEQ ID NO: 7482 - DNA, 201 bp, Homo sapiens
aggaggtagcagcaatcccctaatatatatatatagtgagaactaaaatggatatatttttataatgcagaagaaggaaagtccccctgtgtggtaactgkattgttctagaaatatgctttctagagatatgatgattttgaaactgatttctagaaaaagctgactccatttttgtccctggcgggtaaattaggaatc

SEQ ID NO: 7483 - DNA, 201 bp, Homo sapiens
gtagcagcaatcccctaatatatatatatagtgagaactaaaatggatatatttttataatgcagaagaaggaaagtccccctgtgtggtaactgtattgktctagaaatatgctttctagagatatgatgattttgaaactgatttctagaaaaagctgactccatttttgtccctggcgggtaaattaggaatctgcac

SEQ ID NO: 7484 - DNA, 201 bp, Homo sapiens
ggatccggttccttggtgtcatccagccttagcaaaccagaggtatttgggaataagatgatcattccttccctggatggagccctcttccagtgggaccragaccgtgaaagcatggaaacagttcctttcacagttgaatcacttcttgaatcttcttataaatttggagatgatgttgttttggttggaggaaaatct

SEQ ID NO: 7485 - DNA, 201 bp, Homo sapiens
atcatagcaacaacgtttattgtgcgcaggcttttccatcctcatcctcacaggcaaaggaaggagtctgaaactcagtgtcaaactgaaaataaatatgwttctgtaagtggtgaagccaatgacagtagctggaatgacataaaaaactctggatatatatcacgatatctaactgattttgagccaattcaatgcctg

SEQ ID NO: 7486 - DNA, 201 bp, Homo sapiens
aacgacctgaagctataaacatcattgaaaatgctgtatttgaggacttggactttccaggaaaaacagtgctcagacagaggtctcgctccttgagttcrtcgggaacaaaacattcaagacagtccaacaactcccatagccctttgccaagcaattagccttaagttgtgctagcaaccctaataggtgatgcagata

SEQ ID NO: 7487 - DNA, 201 bp, Homo sapiens
aatatgattctgtaagtggtgaagccaatgacagtagctggaatgacataaaaaactctggatatatatcacgatatctaactgattttgagccaattcartgcctgggacgtggtggctttggagttgtttttgaagctaaaaacaaagtagatgactgcaattatgctatcaagaggatccgtctccccaatagggaat

SEQ ID NO: 7488 - DNA, 201 bp, Homo sapiens
ggatgaaatttggctgaaagatgaaagcacagactggccactcagctctcctagcccaatggatgcaccatcagttaaaatacgcagaatggatcctttckctacaaaagaacatattgaaatcatagctccttcaccacaaagaagcaggtctttttcagtagggatttcctgtgaccagacaagttcatctgagagcca

SEQ ID NO: 7489 - DNA, 201 bp, Homo sapiens
aggtcattagtaattatcagcactttagatgggagaattgctgccttggatcctgaaaatcatggtaaaaagcagtgggatttggatgtgggatccggttscttggtgtcatccagccttagcaaaccagaggtatttgggaataagatgatcattccttccctggatggagccctcttccagtgggaccgagaccgtgaa

SEQ ID NO: 7490 - DNA, 201 bp, Homo sapiens
caaatcttcttctgaagctacattgtctatttctcctccaagaccaaccactttaagtttagatctcactaaaaacaccacagaaaaactccagcccagtycaccaaaggtgtatctttacattcaaatgcagctgtgcagaaaagaaaacctcaaagactggatgaatggacgatgtaccatagaggagagagagaggag

SEQ ID NO: 7491 - DNA, 201 bp, Homo sapiens
atcagttaaaatacgcagaatggatcctttctctacaaaagaacatattgaaatcatagctccttcaccacaaagaagcaggtctttttcagtagggattycctgtgaccagacaagttcatctgagagccagttctcaccactggaattctcaggaatggaccatgaggacatcagtgagtcagtggatgcagcatacaa

SEQ ID NO: 7492 - DNA, 201 bp, Homo sapiens
tctgaaactcagtgtcaaactgaaaataaatatgattctgtaagtggtgaagccaatgacagtagctggaatgacataaaaaactctggatatatatcacratatctaactgattttgagccaattcaatgcctgggacgtggtggctttggagttgtttttgaagctaaaaacaaagtagatgactgcaattatgctatc

SEQ ID NO: 7493 - DNA, 201 bp, Homo sapiens; identical to SEQ ID NO: 7482

SEQ ID NO: 7494 - DNA, 201 bp, Homo sapiens; identical to SEQ ID NO: 7483

SEQ ID NO: 7495 - DNA, 201 bp, Homo sapiens; identical to SEQ ID NO: 7484

SEQ ID NO: 7496 - DNA, 201 bp, Homo sapiens; identical to SEQ ID NO: 7485

SEQ ID NO: 7497 - DNA, 201 bp, Homo sapiens; identical to SEQ ID NO: 7486

SEQ ID NO: 7498 - DNA, 201 bp, Homo sapiens; identical to SEQ ID NO: 7487

SEQ ID NO: 7499 - DNA, 201 bp, Homo sapiens; identical to SEQ ID NO: 7488

SEQ ID NO: 7500 - DNA, 201 bp, Homo sapiens; identical to SEQ ID NO: 7489

SEQ ID NO: 7501 - DNA, 201 bp, Homo sapiens; identical to SEQ ID NO: 7490

SEQ ID NO: 7502 - DNA, 201 bp, Homo sapiens; identical to SEQ ID NO: 7491

SEQ ID NO: 7503 - DNA, 201 bp, Homo sapiens; identical to SEQ ID NO: 7492

SEQ ID NO: 7504 - DNA, 201 bp, Homo sapiens
actcagggaccagaaggcggctgcaggacgcgaccgagcaggaccccaggcccgggaacgacgtcgcgagcgctgagactgccgggcctcccagcccatcwggcattcgagcgcaggaccgggcgccccggcaccgccgcgcgccacccgctaggatgccggtggccccagcgccctcagccgacggaggagccctttttc

SEQ ID NO: 7505 - DNA, 201 bp, Homo sapiens
atcgagcggcacttgacaatgatcaaaatgaggccttacgacgccaacaagaggcaccgcgtcttcctcctgatcgggatgtgctggctcattgccttcaygctgggcgccctgcccattctgggctggaactgcctgcacaatctccctgactgctctaccatcctgcccctctactccaagaagtacattgccttctgc

SEQ ID NO: 7506 - DNA, 201 bp, Homo sapiens
ccatcgagcggcacttgacaatgatcaaaatgaggccttacgacgccaacaagaggcaccgcgtcttcctcctgatcgggatgtgctggctcattgccttyacgctgggcgccctgcccattctgggctggaactgcctgcacaatctccctgactgctctaccatcctgcccctctactccaagaagtacattgccttct

SEQ ID NO: 7507 - DNA, 201 bp, Homo sapiens
actgcctgcacaatctccctgactgctctaccatcctgcccctctactccaagaagtacattgccttctgcatcagcatcttcacggccatcctggtgacsatcgtgatcctctacgcacgcatctacttcctggtgaagtccagcagccgtaaggtggccaaccacaacaactcggagcggtccatggcactgctgcgga

SEQ ID NO: 7508 - DNA, 201 bp, Homo sapiens
accatcgtgatcctctacgcacgcatctacttcctggtgaagtccagcagccgtaaggtggccaaccacaacaactcggagcggtccatggcactgctgcrgaccgtggtgattgtggtgagcgtgttcatcgcctgctggtccccactcttcatcctcttcctcattgatgtggcctgcagggtgcaggcgtgccccatc

SEQ ID NO: 7509 - DNA, 201 bp, Homo sapiens
cagcttctggggcctccacagacccccctcctgcggggcacgctggcctaagagacgtggcactgagcctcggctgtcgagaggggacttcccacggcccrtggacctttgtgctcctggggcagagcctccggcacccagtggcctcccccagacagagccacccctgccgtgggaacctgtccgtgttcctgcgtggat

SEQ ID NO: 7510 - DNA, 201 bp, Homo sapiens
ctgccgctcctgcaggcccccccactcctaggcccggcagctgcagccccttccagatgaagaccaagcgcccctcctggggctgctgcagcttctggggsctccacagacccccctcctgcggggcacgctggcctaagagacgtggcactgagcctcggctgtcgagaggggacttcccacggcccgtggacctttgtg

SEQ ID NO: 7511 - DNA, 201 bp, Homo sapiens
ccccaaggagctccctggccgagagcttcttcgtggattatgaggagaacgagggggctggcccttacctgctcaacgggtcctacctggagctgagcagygacagggttgccaacagctcctccgaggccccattccccaacgttagcaccagcctgctcacctcggccgggaacaggactcacaaggccaggaccaggc

SEQ ID NO: 7512 - DNA, 201 bp, Homo sapiens
accggcagtggaccgtctccgactggggaccgtgcagtggaagctgcgggcaaggccgcaccatcaggcacgtgtactgcaagaccagcgacggacgggtrgtacctgagtcccagtgccagatggagaccaagcctctggccatccacccctgtggggacaaaaactgtcccgcccactggctggcccaggactgggagc

SEQ ID NO: 7513 - DNA, 201 bp, Homo sapiens
acctggagctgagcagcgacagggttgccaacagctcctccgaggccccattccccaacgttagcaccagcctgctcacctcggccgggaacaggactcayaaggccaggaccaggcccaaggcgcgcaagcaaggcgtgagtcccgcggacatgtaccggtggaagctctcgtcccacgagccctgcagtgccacctgca

SEQ ID NO: 7514 - DNA, 201 bp, Homo sapiens
ccgtctccgactggggaccgtgcagtggaagctgcgggcaaggccgcaccatcaggcacgtgtactgcaagaccagcgacggacgggtagtacctgagtcscagtgccagatggagaccaagcctctggccatccacccctgtggggacaaaaactgtcccgcccactggctggcccaggactgggagcggtgcaacacca

SEQ ID NO: 7515 - DNA, 201 bp, Homo sapiens
ggaagaagtccgctgacgtgctagctcttgcagatgaagctggctactacttcttcaacggcaactacaaggtggacagccccaagaacttcaacatcgcwggcacggtggtcaagtaccggcggcccatggatgtctatgagaccggaatcgagtacatcgtggcacaggggcccaccaaccagggcctgaatgtcatgg

SEQ ID NO: 7516 - DNA, 201 bp, Homo sapiens
ctccggcacccagtggcctcccccagacagagccacccctgccgtgggaacctgtccgtgttcctgcgtggatcctgtgtttgtggctcccactccccagccccccagcagcccccagccgaggggcccagggcccacagccagcggtggaggtgtcttgctccgggcccgtagcccacgccctctctgggtggcagggcc

SEQ ID NO: 7517 - DNA, 201 bp, Homo sapiens
cactcctaggcccggcagctgcagccccttccagatgaagaccaagcgcccctcctggggctgctgcagcttctggggcctccacagacccccctcctgcrgggcacgctggcctaagagacgtggcactgagcctcggctgtcgagaggggacttcccacggcccgtggacctttgtgctcctggggcagagcctccggc

SEQ ID NO: 7518 - DNA, 201 bp, Homo sapiens
ggctcgccaagaagcctcccgaggagagcacgtgtttcgagaggccctgcttcaagtggtacaccagcccctggtcagagtgcaccaagacctgcggggtrggcgtgaggatgcgagacgtcaagtgctaccaggggaccgacatcgtccgtggttgcgatccgttggtgaagcccgttggcagacaggcctgtgatctgc

SEQ ID NO: 7519 - DNA, 201 bp, Homo sapiens
gctagctcttgcagatgaagctggctactacttcttcaacggcaactacaaggtggacagccccaagaacttcaacatcgctggcacggtggtcaagtacmggcggcccatggatgtctatgagaccggaatcgagtacatcgtggcacaggggcccaccaaccagggcctgaatgtcatggtgtggaaccagaacggcaa

SEQ ID NO: 7520 - DNA, 201 bp, Homo sapiens
gctgcagccgccacacgagagccgcccccagcccatctactatggcttctccgagagcgctgagagccagggcctggacggggccgggctgatgggcttcrtcccgcacaacggctccctctacggccaggcctcctcagagcggctgggcctggacaaccggctgttcggccacccgggcctggacatggagctgggccc

SEQ ID NO: 7521 - DNA, 201 bp, Homo sapiens
acccgaagccaggatggatggcagatggcaatgttcctgctgggcctggttcctgctggttctggcagttgtagctggggacacagtgtcaaccgggtccrcggacaacagcccaacatccaatagcctggaggggggcaccgacgccacggccttctggtggggggagtggaccaagtggacggcgtgttcccgcagttg

SEQ ID NO: 7522 - DNA, 201 bp, Homo sapiens
tggagaccaagcctctggccatccacccctgtggggacaaaaactgtcccgcccactggctggcccaggactgggagcggtgcaacaccacctgcgggcgyggggtcaagaagcggctggtgctctgcatggagctggccaacgggaagccgcagacgcgcagtggccccgagtgcgggctcgccaagaagcctcccgagg

SEQ ID NO: 7523 - DNA, 201 bp, Homo sapiens
cccgcagttgcgggggtggggtgacatcccaggagcggcactgcctgcagcagaggaggaagtccgtcccgggccccgggaacaggacctgcacgggcacrtccaagcggtaccagctctgcagagtgcaggagtgtccgccggacgggaggagcttccgcgaggagcagtgcgtctccttcaactcccacgtgtacaacg

SEQ ID NO: 7524 - DNA, 201 bp, Homo sapiens
gcaactacaaggtggacagccccaagaacttcaacatcgctggcacggtggtcaagtaccggcggcccatggatgtctatgagaccggaatcgagtacatygtggcacaggggcccaccaaccagggcctgaatgtcatggtgtggaaccagaacggcaaaagcccctccatcaccttcgagtacacgctgctgcagccgc

SEQ ID NO: 7525 - DNA, 201 bp, Homo sapiens
cagaggccatggggtgagaggggctcaggcagccaaggaggcccaggcgtgctccctcttatggagcccctcccatggagctctcttcccgccgcactttytaccccgggcagaggcgcttgcccacgggacgtttggggatggacctcggcccccgcccctgcagtcagcgtcagtgctcatctacgttaataaagtggt

SEQ ID NO: 7526 - DNA, 201 bp, Homo sapiens
cccaccttggttactctctggtgacccacatcccggctggtgcccgagacatccagattgtagagaggaagaagtccgctgacgtgctagctcttgcagaygaagctggctactacttcttcaacggcaactacaaggtggacagccccaagaacttcaacatcgctggcacggtggtcaagtaccggcggcccatggatg

SEQ ID NO: 7527 - DNA, 201 bp, Homo sapiens; identical to SEQ ID NO: 7509

SEQ ID NO: 7528 - DNA, 201 bp, Homo sapiens; identical to SEQ ID NO: 7510

SEQ ID NO: 7529 - DNA, 201 bp, Homo sapiens; identical to SEQ ID NO: 7512

SEQ ID NO: 7530 - DNA, 201 bp, Homo sapiens; identical to SEQ ID NO: 7514

SEQ ID NO: 7531 - DNA, 201 bp, Homo sapiens; identical to SEQ ID NO: 7517

SEQ ID NO: 7532 - DNA, 201 bp, Homo sapiens; identical to SEQ ID NO: 7518

SEQ ID NO: 7533 - DNA, 201 bp, Homo sapiens; identical to SEQ ID NO: 7519

SEQ ID NO: 7534 - DNA, 201 bp, Homo sapiens; identical to SEQ ID NO: 7520

SEQ ID NO: 7535 - DNA, 201 bp, Homo sapiens
cttgcttcctaggatggatggcagatggcaatgttcctgctgggcctggttcctgctggttctggcagttgtagctggggacacagtgtcaaccgggtccrcggacaacagcccaacatccaatagcctggaggggggcaccgacgccacggccttctggtggggggagtggaccaagtggacggcgtgttcccgcagttg

SEQ ID NO: 7536 - DNA, 201 bp, Homo sapiens
gaggcctgggcactggctgggccccgagggctcttcccaaagcgtaccctggtcatctggaagaggatcggagctggcctggtggtgacagtggccttgcytcctaggatggatggcagatggcaatgttcctgctgggcctggttcctgctggttctggcagttgtagctggggacacagtgtcaaccgggtccacggac

SEQ ID NO: 7537 - DNA, 201 bp, Homo sapiens; identical to SEQ ID NO: 7523

SEQ ID NO: 7538 - DNA, 201 bp, Homo sapiens; identical to SEQ ID NO: 7526

SEQ ID NO: 7539 - DNA, 201 bp, Homo sapiens; identical to SEQ ID NO: 7511

SEQ ID NO: 7540 - DNA, 201 bp, Homo sapiens; identical to SEQ ID NO: 7513

SEQ ID NO: 7541 - DNA, 201 bp, Homo sapiens; identical to SEQ ID NO: 7516

SEQ ID NO: 7542 - DNA, 201 bp, Homo sapiens; identical to SEQ ID NO: 7515

SEQ ID NO: 7543 - DNA, 201 bp, Homo sapiens; identical to SEQ ID NO: 7522

SEQ ID NO: 7544 - DNA, 201 bp, Homo sapiens; identical to SEQ ID NO: 7524

SEQ ID NO: 7545 - DNA, 201 bp, Homo sapiens
ctggcggagaaaatccccttcttttttttctctctctttttttctttttgagacggaatctcactctttcacccagactggagggcagcggcgagatctcrgctcactgcaacctccacctcccaggttcaagcaattctcctgcctcagccttccgagtagctgggattacaggtgcccgccaccacgcccagctaattt

SEQ ID NO: 7546 - DNA, 201 bp, Homo sapiens; identical to SEQ ID NO: 7525

SEQ ID NO: 7547 - DNA, 201 bp, Homo sapiens
gaatctcactctttcacccagactggagggcagcggcgagatctcggctcactgcaacctccacctcccaggttcaagcaattctcctgcctcagccttcygagtagctgggattacaggtgcccgccaccacgcccagctaatttttgtatttttagtagagacaggattttaccatgttggccatgctggtctcaaact

SEQ ID NO: 7548 - DNA, 174 bp, Homo sapiens
gttatgttctcaattgttttcctcctcttactttctctcctgcctcgtttggacaggccagtggcattcgcccttgaggtccctcgcagccccggcccccygggcccgcccacacctctggcttcctctgtgcatcctgtgaagtctgtttctgatgcgttggcgtggggggtg

SEQ ID NO: 7549 - DNA, 201 bp, Homo sapiens
cctctccttttgtgccctgccatggagccccagggccggggcagcccctctctgcccagggaaggcaccgccctcaaagacaaggcttggccgggcagtgrccttccctgagcggaggggtggcttgagcaggacacttcttgcccttactcaaaaacgaaatggccagtttccagaggcgtcgggggaacggctgacgaa

SEQ ID NO: 7550 - DNA, 201 bp, Homo sapiens
ggattcctttggcacacccacctggccccaggccccaagtggggcttggctgagccctcctggaatccctgtcctcaggggaggcccagctggggcctggrgctagaaggaccaggtgaccatacagccggctgggcatgcaccagggctctcaggcacagaggccaccgttactcctgatgattctgtctcagacccaac

SEQ ID NO: 7551 - DNA, 201 bp, Homo sapiens
caggagcccccttccctctctggggctctgcctctccttttgtgccctgccatggagccccagggccggggcagcccctctctgcccagggaaggcaccgycctcaaagacaaggcttggccgggcagtgaccttccctgagcggaggggtggcttgagcaggacacttcttgcccttactcaaaaacgaaatggccagtt

SEQ ID NO: 7552 - DNA, 201 bp, Homo sapiens
tacccgtctctccctctctctcacacacacactcttccgggttcaagggccaagtgtctgcctaggctgagacacgtgctgagctccctgaagatggaccrgctgccccctagaagggagactttcaggggcatcagggcccttgggatgctccgccctgaccagctttttggtggcagagggaggcacggggagagggag

SEQ ID NO: 7553 - DNA, 201 bp, Homo sapiens
gaggacgaggaggaaccagacttcgccgttcactcgcacctgcccccgctgcactccaaccgcaacctggtgctgaccaacgggccggcgctctaccccaycgcctccacctccttcagccagaagtccccgcaggcccgcgccctctgccgcagctgctcccactgcgagccccccaccttcttcctgcaggagccgccg

SEQ ID NO: 7554 - DNA, 201 bp, Homo sapiens
gaggacagaggtcttcaggctgtgggtctcaacaggaactgagatccccaagggagacagagctgcaggtcacctcccctacctgcttctcagcaggaccyaggaggcctggcccagctcctggtggaccccaagcagccagagcctactgctgccatctgaagacctcatctgagcccactttccaccaagcgcccaccc

SEQ ID NO: 7555 - DNA, 201 bp, Homo sapiens
ttccccatgagacttggctggcccttcccacccctgggcctcagtctccccatcttgtgtgatgaggagagaccctgaggacagaggtcttcaggctgtgrgtctcaacaggaactgagatccccaagggagacagagctgcaggtcacctcccctacctgcttctcagcaggacccaggaggcctggcccagctcctggt

SEQ ID NO: 7556 - DNA, 201 bp, Homo sapiens
ccttgaactccagcctctttctctccatttttccctctctctcccctacccgtctctccctctctctcacacacacactcttccgggttcaagggccaagygtctgcctaggctgagacacgtgctgagctccctgaagatggaccagctgccccctagaagggagactttcaggggcatcagggcccttgggatgctccg

SEQ ID NO: 7557 - DNA, 110 bp, Homo sapiens
cattcgcccttgaggtccctcgcagccccggccccccgggcccgcccacacctctggcttcctctgtgcatcctgtgaagtctgtttctgatgcgttggcrtggggggtg

SEQ ID NO: 7558 - DNA, 201 bp, Homo sapiens
aggaagaggacgtgctgaacggcggggagcgcgtgctctacaagagcgtgagccaggaggacgtggagctgccccggggggctttcgggggcctgcaggckctcaaccccaaccgcctctcagccatgcgggaggccttcgccaggagccgcagcatcagcaccgacgtgtgacctgggcccgcccccgggatcctggcct

SEQ ID NO: 7559 - DNA, 201 bp, Homo sapiens
ggcaccgccctcaaagacaaggcttggccgggcagtgaccttccctgagcggaggggtggcttgagcaggacacttcttgcccttactcaaaaacgaaatsgccagtttccagaggcgtcgggggaacggctgacgaagtcacaatcgttatgttctcaattgttttcctcctcttactttctctcctgcctcgtttggac

SEQ ID NO: 7560 - DNA, 201 bp, Homo sapiens
cctcagtctccccatcttgtgtgatgaggagagaccctgaggacagaggtcttcaggctgtgggtctcaacaggaactgagatccccaagggagacagagytgcaggtcacctcccctacctgcttctcagcaggacccaggaggcctggcccagctcctggtggaccccaagcagccagagcctactgctgccatctgaa

SEQ ID NO: 7561 - DNA, 201 bp, Homo sapiens
gtcaccccctccctgggtctcacccttctcacctgctcaaggaagggatgacctcagtgaggcccagggccctgcagcaaggccctccctggcaattgcaraccaaggattctgctcctccaccttgaactccagcctctttctctccatttttccctctctctcccctacccgtctctccctctctctcacacacacact

SEQ ID NO: 7562 - DNA, 201 bp, Homo sapiens
gacgtggagctgccccggggggctttcgggggcctgcaggcgctcaaccccaaccgcctctcagccatgcgggaggccttcgccaggagccgcagcatcarcaccgacgtgtgacctgggcccgcccccgggatcctggccttgaaggtcctgagacaatggggggattcctttggcacacccacctggccccaggcccca

SEQ ID NO: 7563 - DNA, 201 bp, Homo sapiens
tgcaggagccgccggaggaggaagaggacgtgctgaacggcggggagcgcgtgctctacaagagcgtgagccaggaggacgtggagctgccccggggggcyttcgggggcctgcaggcgctcaaccccaaccgcctctcagccatgcgggaggccttcgccaggagccgcagcatcagcaccgacgtgtgacctgggcccg

SEQ ID NO: 7564 - DNA, 201 bp, Homo sapiens
ctgcaggagccgccggaggaggaagaggacgtgctgaacggcggggagcgcgtgctctacaagagcgtgagccaggaggacgtggagctgccccggggggstttcgggggcctgcaggcgctcaaccccaaccgcctctcagccatgcgggaggccttcgccaggagccgcagcatcagcaccgacgtgtgacctgggccc

SEQ ID NO: 7565 - DNA, 201 bp, Homo sapiens
gtgtctgcctaggctgagacacgtgctgagctccctgaagatggaccagctgccccctagaagggagactttcaggggcatcagggcccttgggatgctcygccctgaccagctttttggtggcagagggaggcacggggagagggagaggccatgtcgcagtccccctgccgtgggagaggcaacgcggaaatgtataga

SEQ ID NO: 7566 - DNA, 201 bp, Homo sapiens
cttggtttccccatctggaagtggagggcgcccgcctcacctggttagaggggccgcttgtgaagccatcagattgcagggcccgtgcagctgcactgccrtcgggacgtctgtgtgtttaccaggctccccgtcctggggcccggttggtttggaaggcgcggggctggatgagccagagggcacggccagtgccgagga

SEQ ID NO: 7567 - DNA, 201 bp, Homo sapiens
ttcttcctgcaggagccgccggaggaggaagaggacgtgctgaacggcggggagcgcgtgctctacaagagcgtgagccaggaggacgtggagctgccccsgggggctttcgggggcctgcaggcgctcaaccccaaccgcctctcagccatgcgggaggccttcgccaggagccgcagcatcagcaccgacgtgtgacct

SEQ ID NO: 7568 - DNA, 201 bp, Homo sapiens
ccagaaacagggccagcaagcggcagtgaacggaggcagcccggggctcgtcagggtgggcagagccatggcccaggggttgaaaacccccgagttccccrtgagacttggctggcccttcccacccctgggcctcagtctccccatcttgtgtgatgaggagagaccctgaggacagaggtcttcaggctgtgggtctca

SEQ ID NO: 7569 - DNA, 201 bp, Homo sapiens
ctggccttgaaggtcctgagacaatggggggattcctttggcacacccacctggccccaggccccaagtggggcttggctgagccctcctggaatccctgycctcaggggaggcccagctggggcctggggctagaaggaccaggtgaccatacagccggctgggcatgcaccagggctctcaggcacagaggccaccgtt

SEQ ID NO: 7570 - DNA, 201 bp, Homo sapiens
aacgaaatggccagtttccagaggcgtcgggggaacggctgacgaagtcacaatcgttatgttctcaattgttttcctcctcttactttctctcctgcctsgtttggacaggccagtggcattcgcccttgaggtccctcgcagccccggccccccgggcccgcccacacctctggcttcctctgtgcatcctgtgaagtc

SEQ ID NO: 7571 - DNA, 201 bp, Homo sapiens
ccttactcaaaaacgaaatggccagtttccagaggcgtcgggggaacggctgacgaagtcacaatcgttatgttctcaattgttttcctcctcttactttstctcctgcctcgtttggacaggccagtggcattcgcccttgaggtccctcgcagccccggccccccgggcccgcccacacctctggcttcctctgtgcat

SEQ ID NO: 7572 - DNA, 201 bp, Homo sapiens
cttccctgagcggaggggtggcttgagcaggacacttcttgcccttactcaaaaacgaaatggccagtttccagaggcgtcgggggaacggctgacgaagwcacaatcgttatgttctcaattgttttcctcctcttactttctctcctgcctcgtttggacaggccagtggcattcgcccttgaggtccctcgcagcccc

SEQ ID NO: 7573 - DNA, 201 bp, Homo sapiens
ccttgggatgctccgccctgaccagctttttggtggcagagggaggcacggggagagggagaggccatgtcgcagtccccctgccgtgggagaggcaacgyggaaatgtatagacccagtgctcagccagaaacagggccagcaagcggcagtgaacggaggcagcccggggctcgtcagggtgggcagagccatggccca

SEQ ID NO: 7574 - DNA, 201 bp, Homo sapiens
gttaatgacctgggtgtgtccttttctacattgcccactgtactggctgctgtgtgttttcatgccccagagacaacttttgatgcctgcctggcccagaygttcttcatccacttttcctcctggacagagtttggcatcctactggccatgagttttgaccactatgtggccatctgtaacccgctgcgctatgccaca

SEQ ID NO: 7575 - DNA, 201 bp, Homo sapiens
tttgggactaacatctcaagtactaccagcttcactctaacaggcttccctgagatgaagggtctggagcactggctggctgcccttctgctgctgctttrtgctatttccttcctgggcaacatcctcatcctctttatcataaaggaagagcagagcttgcaccagccaatgtactacttcctgtctcttttttctgtt

SEQ ID NO: 7576 - DNA, 201 bp, Homo sapiens
actatgtggccatctgtaacccgctgcgctatgccacagtgctcactgatgtccgtgtggcccacaatggcatatccattgtcatccgcagcttctgcatrgtattcccacttcccttcctcctgaagagactgcctttctgtaaggccagtgtggtactggcccattcctactgtctgcatgcagacctgattcggctgc

SEQ ID NO: 7577 - DNA, 201 bp, Homo sapiens
atgtactacttcctgtctcttttttctgttaatgacctgggtgtgtccttttctacattgcccactgtactggctgctgtgtgttttcatgccccagagamaacttttgatgcctgcctggcccagatgttcttcatccacttttcctcctggacagagtttggcatcctactggccatgagttttgaccactatgtggcc

SEQ ID NO: 7578 - DNA, 201 bp, Homo sapiens
gctatgccacagtgctcactgatgtccgtgtggcccacaatggcatatccattgtcatccgcagcttctgcatggtattcccacttcccttcctcctgaasagactgcctttctgtaaggccagtgtggtactggcccattcctactgtctgcatgcagacctgattcggctgccctgtggagacactaccatcaacagca

SEQ ID NO: 7579 - DNA, 201 bp, Homo sapiens
tcccacttcccttcctcctgaagagactgcctttctgtaaggccagtgtggtactggcccattcctactgtctgcatgcagacctgattcggctgccctgkggagacactaccatcaacagcatgtatggcctgttcattgtcatctctgcctttggtgtagattcactgctcatcctcctctcctatgtgctcattctac

SEQ ID NO: 7580 - DNA, 201 bp, Homo sapiens
tggctggctgcccttctgctgctgctttatgctatttccttcctgggcaacatcctcatcctctttatcataaaggaagagcagagcttgcaccagccaaygtactacttcctgtctcttttttctgttaatgacctgggtgtgtccttttctacattgcccactgtactggctgctgtgtgttttcatgccccagagaca

SEQ ID NO: 7581 - DNA, 201 bp, Homo sapiens
ctggctggctgcccttctgctgctgctttatgctatttccttcctgggcaacatcctcatcctctttatcataaaggaagagcagagcttgcaccagccartgtactacttcctgtctcttttttctgttaatgacctgggtgtgtccttttctacattgcccactgtactggctgctgtgtgttttcatgccccagagac

SEQ ID NO: 7582 - DNA, 201 bp, Homo sapiens
ctgcgctatgccacagtgctcactgatgtccgtgtggcccacaatggcatatccattgtcatccgcagcttctgcatggtattcccacttcccttcctccygaagagactgcctttctgtaaggccagtgtggtactggcccattcctactgtctgcatgcagacctgattcggctgccctgtggagacactaccatcaac

SEQ ID NO: 7583 - DNA, 201 bp, Homo sapiens
cctttggtgtagattcactgctcatcctcctctcctatgtgctcattctacattctgtgctggccattgcctccaggggtgagaggcttaagacactcaayacatgtgtgtcacatatctatgcagtgctgatcttctatgtgcctatggttagtgtgtccatggttcatcgatttgggaggcatgctcctgaatatgtgc

SEQ ID NO: 7584 - DNA, 201 bp, Homo sapiens
ctcaagtactaccagcttcactctaacaggcttccctgagatgaagggtctggagcactggctggctgcccttctgctgctgctttatgctatttccttcytgggcaacatcctcatcctctttatcataaaggaagagcagagcttgcaccagccaatgtactacttcctgtctcttttttctgttaatgacctgggtgt

SEQ ID NO: 7585 - DNA, 154 bp, Homo sapiens
gtgatcctcccacctcagcctcctgagtagctgggaccataggctcacaacaccacacctggcaaatttgatttttttttttttttcagagacggggtctygcaacattgcccagacttcctttgtgttagttaataaagctttctcaactgcc

SEQ ID NO: 7586 - DNA, 201 bp, Homo sapiens
cactttcccactgcccatcggggaatcagtgactgtcactcgagatcttgagggcacctacctctgtcgggccaggagcactcaaggggaggtcacccgcragccccccggtatgagattgtcatcatcactgtggtagcagccgcagtcataatgggcactgcaggcctcagcacgtacctctataaccgccagcggaag

SEQ ID NO: 7587 - DNA, 201 bp, Homo sapiens
tatgtatttattcatttgttattttaccagctatttattgagtgtcttttatgtaggctaaatgaacataggtctctggcctcacggagctcccagtcctratcacattcaaggtcaccaggtacagttgtacaggttgtacactgcaggagagtgcctggcaaaaagatcaaatggggctgggacttctcattggccaac

SEQ ID NO: 7588 - DNA, 168 bp, Homo sapiens
ccttttgggctcaagtgatcctcccacctcagcctcctgagtagctgggaccataggctcacaacaccacacctggcaaatttgatttttttttttttttyagagacggggtctcgcaacattgcccagacttcctttgtgttagttaataaagctttctcaactgcc

SEQ ID NO: 7589 - DNA, 123 bp, Homo sapiens
cgtgtttttccagatggcccccractggacgagagggattgtccgggaaactggacgtggccagaaaattcccagcagactccaatgtgccaggcttgggggaacccattgcccgagctcaag

SEQ ID NO: 7590 - DNA, 102 bp, Homo sapiens
crtgtttttccagatggcccccgactggacgagagggattgtccgggaaactggacgtggccagaaaattcccagcagactccaatgtgccaggcttggggg

SEQ ID NO: 7591 - DNA, 201 bp, Homo sapiens
taaccgccagcggaagatcaagaaatacagactacaacaggcccaaaaagggacccccatgaaaccgaacacacaagccacgcctccctgaacctatcccrggacagggcctcttcctcggccttcccatattggtggcagtggtgccacactgaacagagtggaagacatatgccatgcagctacacctaccggccctgg

SEQ ID NO: 7592 - DNA, 201 bp, Homo sapiens
tgcagctccagtttcctgcagtgatcagggtcctgcaagcagtggggaagggggccaaggtattggaggactccctcccagctttggaagcctcatccgcktgtgtgtgtgtgtgtatgtgtagacaagctctcgctctgtcacccaggctggagtgcagtggtgcaatcatggttcactgcagtcttgaccttttgggct

SEQ ID NO: 7593 - DNA, 201 bp, Homo sapiens
caggttgtacactgcaggagagtgcctggcaaaaagatcaaatggggctgggacttctcattggccaacctgcctttccccagaaggagtgatttttctaycggcacaaaagcactatatggactggtaatggttacaggttcagagattacccagtgaggccttattcctcccttccccccaaaactgacacctttgtta

SEQ ID NO: 7594 - DNA, 201 bp, Homo sapiens
cgcgtgtgtgtgtgtgtgtatgtgtagacaagctctcgctctgtcacccaggctggagtgcagtggtgcaatcatggttcactgcagtcttgaccttttgrgctcaagtgatcctcccacctcagcctcctgagtagctgggaccataggctcacaacaccacacctggcaaatttgatttttttttttttttcagagacg

SEQ ID NO: 7595 - DNA, 201 bp, Homo sapiens
tctctggcctcacggagctcccagtcctaatcacattcaaggtcaccaggtacagttgtacaggttgtacactgcaggagagtgcctggcaaaaagatcaratggggctgggacttctcattggccaacctgcctttccccagaaggagtgatttttctatcggcacaaaagcactatatggactggtaatggttacaggt

SEQ ID NO: 7596 - DNA, 169 bp, Homo sapiens
accttttgggctcaagtgatcctcccacctcagcctcctgagtagctgggaccataggctcacaacaccacacctggcaaatttgattttttttttttttycagagacggggtctcgcaacattgcccagacttcctttgtgttagttaataaagctttctcaactgcc

SEQ ID NO: 7597 - DNA, 162 bp, Homo sapiens
gggctcaagtgatcctcccacctcagcctcctgagtagctgggaccataggctcacaacaccacacctggcaaatttgatttttttttttttttcagagayggggtctcgcaacattgcccagacttcctttgtgttagttaataaagctttctcaactgcc

SEQ ID NO: 7598 - DNA, 201 bp, Homo sapiens
cctatcccgggacagggcctcttcctcggccttcccatattggtggcagtggtgccacactgaacagagtggaagacatatgccatgcagctacacctacyggccctgggacgccggaggacagggcattgtcctcagtcagatacaacagcatttggggccatggtacctgcacacctaaaacactaggccacgcatctg

SEQ ID NO: 7599 - DNA, 201 bp, Homo sapiens
actccaatgtgccaggcttgggggaacccattgcccgagctcaagtgtctaaaggatggcactttcccactgcccatcggggaatcagtgactgtcactcragatcttgagggcacctacctctgtcgggccaggagcactcaaggggaggtcacccgcaagccccccggtatgagattgtcatcatcactgtggtagcag

SEQ ID NO: 7600 - DNA, 201 bp, Homo sapiens
gcaagcagtggggaagggggccaaggtattggaggactccctcccagctttggaagcctcatccgcgtgtgtgtgtgtgtgtatgtgtagacaagctctckctctgtcacccaggctggagtgcagtggtgcaatcatggttcactgcagtcttgaccttttgggctcaagtgatcctcccacctcagcctcctgagtagc

SEQ ID NO: 7601 - DNA, 201 bp, Homo sapiens
tagcctgatgagaggggaagtggtgggggagacatagccccaccatgaggacatacaactgggaaatactgaaacttgctgcctattgggtatgctgaggycccacagacttacagaagaagtggccctccatagacatgtgtagcatcaaaacacaaaggcccacacttcctgacggatgccagcttgggcactgctgtc

SEQ ID NO: 7602 - DNA, 201 bp, Homo sapiens
agccagctgtgggggagcccgctgaggtcacgaccacggtgctggtgaggagagatcaccatggagccaatttctcgtgccgcactgaactggacctgcgsccccaagggctggagctgtttgagaacacctcggccccctaccagctccagacctttgtcctgccagcgactcccccacaacttgtcagcccccgggtcc

SEQ ID NO: 7603 - DNA, 154 bp, Homo sapiens; identical to SEQ ID NO: 7585

SEQ ID NO: 7604 - DNA, 201 bp, Homo sapiens
agaacacctcggccccctaccagctccagacctttgtcctgccagcgactcccccacaacttgtcagcccccgggtcctagaggtggacacgcaggggacmgtggtctgttccctggacgggctgttcccagtctcggaggcccaggtccacctggcactgggggaccagaggttgaaccccacagtcacctatggcaacg

SEQ ID NO: 7605 - DNA, 201 bp, Homo sapiens
gccagctgtgggggagcccgctgaggtcacgaccacggtgctggtgaggagagatcaccatggagccaatttctcgtgccgcactgaactggacctgcggscccaagggctggagctgtttgagaacacctcggccccctaccagctccagacctttgtcctgccagcgactcccccacaacttgtcagcccccgggtcct

SEQ ID NO: 7606 - DNA, 201 bp, Homo sapiens
ccagctccagacctttgtcctgccagcgactcccccacaacttgtcagcccccgggtcctagaggtggacacgcaggggaccgtggtctgttccctggacrggctgttcccagtctcggaggcccaggtccacctggcactgggggaccagaggttgaaccccacagtcacctatggcaacgactccttctcggccaaggc

SEQ ID NO: 7607 - DNA, 154 bp, Homo sapiens
gcgccccagtcgacgctgagctcctctgctactcagagttgcaacctcagcctmgctatggctcccagcagcccccggcccgcgctgcccgcactcctggtcctgctcggggctctgttcccaggacctggcaatgcccagacatctgtgtccc

SEQ ID NO: 7608 - DNA, 201 bp, Homo sapiens
aagccagaggtctcagaagggaccgaggtgacagtgaagtgtgaggcccaccctagagccaaggtgacgctgaatggggttccagcccagccactgggccygagggcccagctcctgctgaaggccaccccagaggacaacgggcgcagcttctcctgctctgcaaccctggaggtggccggccagcttatacacaagaac

SEQ ID NO: 7609 - DNA, 201 bp, Homo sapiens
cactttcccactgcccatcggggaatcagtgactgtcactcgagatcttgagggcacctacctctgtcgggccaggagcactcaaggggaggtcacccgcraggtgaccgtgaatgtgctctccccccggtatgagattgtcatcatcactgtggtagcagccgcagtcataatgggcactgcaggcctcagcacgtacct

SEQ ID NO: 7610 - DNA, 201 bp, Homo sapiens; identical to SEQ ID NO: 7587

SEQ ID NO: 7611 - DNA, 168 bp, Homo sapiens; identical to SEQ ID NO: 7588

SEQ ID NO: 7612 - DNA, 201 bp, Homo sapiens
gacaacgggcgcagcttctcctgctctgcaaccctggaggtggccggccagcttatacacaagaaccagacccgggagcttcgtgtcctgtatggcccccractggacgagagggattgtccgggaaactggacgtggccagaaaattcccagcagactccaatgtgccaggcttgggggaacccattgcccgagctcaag

SEQ ID NO: 7613 - DNA, 201 bp, Homo sapiens
ggacgagggcacccagcggctgacgtgtgcagtaatactggggaaccagagccaggagacactgcagacagtgaccatctacagctttccggcgcccaacrtgattctgacgaagccagaggtctcagaagggaccgaggtgacagtgaagtgtgaggcccaccctagagccaaggtgacgctgaatggggttccagccca

SEQ ID NO: 7614 - DNA, 201 bp, Homo sapiens; identical to SEQ ID NO: 7591

SEQ ID NO: 7615 - DNA, 114 bp, Homo sapiens
gcgccccagtcgaygctgagctcctctgctactcagagttgcaacctcagcctcgctatggctcccagcagcccccggcccgcgctgcccgcactcctggtcctgctcggggct

SEQ ID NO: 7616 - DNA, 201 bp, Homo sapiens
agctccagacctttgtcctgccagcgactcccccacaacttgtcagcccccgggtcctagaggtggacacgcaggggaccgtggtctgttccctggacggkctgttcccagtctcggaggcccaggtccacctggcactgggggaccagaggttgaaccccacagtcacctatggcaacgactccttctcggccaaggcct

SEQ ID NO: 7617 - DNA, 201 bp, Homo sapiens; identical to SEQ ID NO: 7592

SEQ ID NO: 7618 - DNA, 201 bp, Homo sapiens
cgagggcccagctcctgctgaaggccaccccagaggacaacgggcgcagcttctcctgctctgcaaccctggaggtggccggccagcttatacacaagaaycagacccgggagcttcgtgtcctgtatggcccccgactggacgagagggattgtccgggaaactggacgtggccagaaaattcccagcagactccaatgt

SEQ ID NO: 7619 - DNA, 201 bp, Homo sapiens
cctcttggcagccagtgggcaagaaccttaccctacgctgccaggtggagggtggggcaccccgggccaacctcaccgtggtgctgctccgtggggagaasgagctgaaacgggagccagctgtgggggagcccgctgaggtcacgaccacggtgctggtgaggagagatcaccatggagccaatttctcgtgccgcactg

SEQ ID NO: 7620 - DNA, 201 bp, Homo sapiens; identical to SEQ ID NO: 7593

SEQ ID NO: 7621 - DNA, 201 bp, Homo sapiens; identical to SEQ ID NO: 7594

SEQ ID NO: 7622 - DNA, 162 bp, Homo sapiens; identical to SEQ ID NO: 7597

SEQ ID NO: 7623 - DNA, 201 bp, Homo sapiens; identical to SEQ ID NO: 7595

SEQ ID NO: 7624 - DNA, 169 bp, Homo sapiens; identical to SEQ ID NO: 7596

SEQ ID NO: 7625 - DNA, 201 bp, Homo sapiens
gtgaggcccaccctagagccaaggtgacgctgaatggggttccagcccagccactgggcccgagggcccagctcctgctgaaggccaccccagaggacaaygggcgcagcttctcctgctctgcaaccctggaggtggccggccagcttatacacaagaaccagacccgggagcttcgtgtcctgtatggcccccgactgg

SEQ ID NO: 7626 - DNA, 149 bp, Homo sapiens
gcgccccagtcgacgctgagctcctctgctactcagagttgcaacctcmgcctcgctatggctcccagcagcccccggcccgcgctgcccgcactcctggtcctgctcggggctctgttcccaggacctggcaatgcccagacatctgt

SEQ ID NO: 7627 - DNA, 201 bp, Homo sapiens; identical to SEQ ID NO: 7598

SEQ ID NO: 7628 - DNA, 201 bp, Homo sapiens
actccaatgtgccaggcttgggggaacccattgcccgagctcaagtgtctaaaggatggcactttcccactgcccatcggggaatcagtgactgtcactcragatcttgagggcacctacctctgtcgggccaggagcactcaaggggaggtcacccgcaaggtgaccgtgaatgtgctctccccccggtatgagattgtc

SEQ ID NO: 7629 - DNA, 201 bp, Homo sapiens; identical to SEQ ID NO: 7600

SEQ ID NO: 7630 - DNA, 201 bp, Homo sapiens
ggacctggcaatgcccagacatctgtgtccccctcaaaagtcatcctgccccggggaggctccgtgctggtgacatgcagcacctcctgtgaccagcccawgttgttgggcatagagaccccgttgcctaaaaaggagttgctcctgcctgggaacaaccggaaggtgtatgaactgagcaatgtgcaagaagatagccaa

SEQ ID NO: 7631 - DNA, 201 bp, Homo sapiens
aggtccacctggcactgggggaccagaggttgaaccccacagtcacctatggcaacgactccttctcggccaaggcctcagtcagtgtgaccgcagaggaygagggcacccagcggctgacgtgtgcagtaatactggggaaccagagccaggagacactgcagacagtgaccatctacagctttccggcgcccaacgtga

SEQ ID NO: 7632 - DNA, 201 bp, Homo sapiens; identical to SEQ ID NO: 7601

SEQ ID NO: 7633 - DNA, 201 bp, Homo sapiens
ctgagcgagaaaaagaggaatatgaaacaatctggggaaatggccatacatggtggctgacgcctgtaatcccagcactttgggaggccgaggcaggagartcgcttgagcccaggagttcgagaccagcctggacaacatagtgagaccccgtctatgcaaaaaatacacaaattagcctggtgtggtggcccgcacctg

SEQ ID NO: 7634 - DNA, 201 bp, Homo sapiens
ctcaattgcagcaacagctgtccccagccgcagaattccagcctccgcaccccgctgcggcaaggcaagacgctcagagggccgggttgggtgtcttaccrgctgctcgacgtgagggcctggagctccctcgcgcactgcctcgtgacctgcgcaggaaaaacacgctgggccacctccaggatcaccgcctacaaaccg

SEQ ID NO: 7635 - DNA, 201 bp, Homo sapiens; identical to SEQ ID NO: 7633

SEQ ID NO: 7636 - DNA, 201 bp, Homo sapiens
ctcaattgcagcaacagctgtccccagccgcagaattccagcctccgcaccccgctgcggcaaggcaagacgctcagagggccgggttgggtgtcttaccrgctgctcgacgtgagggcctggagctccctcgcgcactgcctcgtgacctgcgcaggaaaaacacgctgggccacctccaggatcaccgcctacagtgtt

SEQ ID NO: 7637 - DNA, 201 bp, Homo sapiens; identical to SEQ ID NO: 7633

SEQ ID NO: 7638 - DNA, 201 bp, Homo sapiens; identical to SEQ ID NO: 7634

SEQ ID NO: 7639 - DNA, 201 bp, Homo sapiens
ccccagcaattggacatgggtggaaggatctgggcgcctgttttcctgtgaggtcgatgggaagccacagccaagcgtgaagtgcgtgggctccgggggcrccactgagggggtgctgctgccgctggcacccccagaccctagtcccagagctcccagaatccctagagtcctggcacccggtatctacgtctgcaacgc

SEQ ID NO: 7640 - DNA, 201 bp, Homo sapiens
tcactgtgggcgtggaataccggccagtggtggccgaacttgctgcctcgccccctggaggcgtgcgcccaggaggaaacttcacgttgacctgccgcgcrgaggcctggcctccagcccagatcagctggcgcgcgcccccgggggccctcaacatcggcctgtcgagcaacaacagcacactgagcgtggcaggcgcca

SEQ ID NO: 7641 - DNA, 201 bp, Homo sapiens
ccgcgggggccggcctggccttctacgtgcagtccaccgcctgcaagaagggcgagtacaacgtgcaggaggccgagagctcaggcgaggccgtgtgtctsaacggagcgggcggcggcgctggcggggcggcaggcgcggagggcggacccgaggcggcggggggcgcggccgagtcgccggcggagggcgaggtcttcg

SEQ ID NO: 7642 - DNA, 201 bp, Homo sapiens
cgagtacaacgtgcaggaggccgagagctcaggcgaggccgtgtgtctgaacggagcgggcggcggcgctggcggggcggcaggcgcggagggcggacccsaggcggcggggggcgcggccgagtcgccggcggagggcgaggtcttcgccatacagctgacatcggcgtgagcccgctcccctctccccgcgggccgggg

SEQ ID NO: 7643 - DNA, 201 bp, Homo sapiens
ggcgctctcaggcacttaccgctgcaaggcggccaatgatcaaggcgaggcggtcaaggacgtaacgctaacggtggagtacgcaccagcgctggacagcrtgggctgcccagaacgcattacttggctggagggaacagaagcctcgctgagctgtgtggcgcacggggtaccgccgcctgatgtgatctgcgtgcgctc

SEQ ID NO: 7644 - DNA, 201 bp, Homo sapiens
agcggtctcgcaggagcccttctgggcggacctgcagcctcgcgtggcgttcgtggagcgcgggggctcgctgtggctgaattgcagcaccaactgccctyggccggagcgcggtggcctggagacctcgctgcgccgaaacgggacccagaggggtttgcgttggttggcgcggcagctggtggacattcgcgagccgga

SEQ ID NO: 7645 - DNA, 201 bp, Homo sapiens
tcatcgaggggctgttgcgtgtggcccgggagcatgcgggcacttaccgctgcgaagccaccaaccctcggggctctgcggccaaaaatgtggccgtcacrgtggaatatggccccaggtttgaggagccgagctgccccagcaattggacatgggtggaaggatctgggcgcctgttttcctgtgaggtcgatgggaagc

SEQ ID NO: 7646 - DNA, 111 bp, Homo sapiens
cgcaactctgyctcccccacaccccacccgccgcgccgcgcggagccgtcctctagcccagctcctcggctcgcgctctcctcgcctcctgtgctttccccgccgcggcga

SEQ ID NO: 7647 - DNA, 201 bp, Homo sapiens
ggagaacgtgaccatctacagcttcccggcaccactcctgaccctgagcgaacccagcgtctccgaggggcagatggtgacagtaacctgcgcagctgggrcccaagctctggtcacactggagggagttccagccgcggtcccggggcagcccgcccagcttcagctaaatgccaccgagaacgacgacagacgcagctt

SEQ ID NO: 7648 - DNA, 201 bp, Homo sapiens
ggaccagaatctgagtcctgatgtcaccctcgaaggggacgcattcgtggccactgccacagccacagctagcgcagagcaggagggtgccaggcagctgrtctgcaacgtcaccctggggggcgaaaaccgggagacccgggagaacgtgaccatctacagcttcccggcaccactcctgaccctgagcgaacccagcgt

SEQ ID NO: 7649 - DNA, 120 bp, Homo sapiens
acacgggggcttatttattgctttatttatttacttattcatttatttatgtattcaactccaagggcgtcacccccattttctacccatcccctcaataragtttttataaaggaactc

SEQ ID NO: 7650 - DNA, 135 bp, Homo sapiens
acgccccccagactcacacgggggcttatttattgctttatttatttacttattcatttatttatgtattcaactccaagggcgtcacccccattttctasccatcccctcaataaagtttttataaaggaactc

SEQ ID NO: 7651 - DNA, 110 bp, Homo sapiens
ttatttattgctttatttatttacttattcatttatttatgtattcaactccaagggcgtcacccccattttctacccatcccctcaataaagtttttatraaggaactc

SEQ ID NO: 7652 - DNA, 201 bp, Homo sapiens
gcgcccccgggggccctcaacatcggcctgtcgagcaacaacagcacactgagcgtggcaggcgccatgggaagccacggcggcgagtacgagtgcgcagscaccaacgcgcacgggcgccacgcgcggcgcatcacggtgcgcgtggccggtccgtggctatgggtcgccgtgggcggcgcggcggggggcgcggcgctg

SEQ ID NO: 7653 - DNA, 201 bp, Homo sapiens
ggctggagggaacagaagcctcgctgagctgtgtggcgcacggggtaccgccgcctgatgtgatctgcgtgcgctctggagaactcggggccgtcatcgargggctgttgcgtgtggcccgggagcatgcgggcacttaccgctgcgaagccaccaaccctcggggctctgcggccaaaaatgtggccgtcacggtggaat

SEQ ID NO: 7654 - DNA, 201 bp, Homo sapiens
cgcgcccccgggggccctcaacatcggcctgtcgagcaacaacagcacactgagcgtggcaggcgccatgggaagccacggcggcgagtacgagtgcgcasccaccaacgcgcacgggcgccacgcgcggcgcatcacggtgcgcgtggccggtccgtggctatgggtcgccgtgggcggcgcggcggggggcgcggcgct

SEQ ID NO: 7655 - DNA, 201 bp, Homo sapiens
tgcctcgccccctggaggcgtgcgcccaggaggaaacttcacgttgacctgccgcgcggaggcctggcctccagcccagatcagctggcgcgcgcccccgrgggccctcaacatcggcctgtcgagcaacaacagcacactgagcgtggcaggcgccatgggaagccacggcggcgagtacgagtgcgcagccaccaacgc

SEQ ID NO: 7656 - DNA, 201 bp, Homo sapiens
atccctttactatgattaatttttgttattccaggaaatacttgtgaagccagccaattaataaagcactttagcatctgttcaggtagttttgaaaaccmacttttccccttcaggataagaacttccaggttacctaaaaatgcaataaaaatctttatagtctaagcttcttggcatataatttttcatcagggtttt

SEQ ID NO: 7657 - DNA, 201 bp, Homo sapiens
aaagcaaattaggactctttctgagcctctttcattgtcagaaatagaatcactttccatcagcttccaggaaattgtgtatctggagtcgaagagatttracatcaagaatccagatttttaaatgtaattgttttttaaatgtgctatattccctcagtgtaaattaataaaaagattacaggaagtttgtcaaaaaat

SEQ ID NO: 7658 - DNA, 201 bp, Homo sapiens
atatgtagctatgtattttactaattgtgaaacactggaaattaatgatgcagacaacttggtgtggtctttgaacagctctctgcagtatttttttttttcctgttaccataaattgtatttaagtgcttgctttccacttaagttgtactaatagaaccggtaactcccagccctccctgtttgacactccttagctta

SEQ ID NO: 7659 - DNA, 201 bp, Homo sapiens
aaaatcactaaactgtgcctaaagaacataactgccatattaatgttttggtttatatcctctatagtaatagaaaaacatttaatacttgtaatgctgaygtgttaatttgataccagttgagtagaatgtgatcaatccagtttacaatctatcatgagtattattaactaaaatctatgtgcttttcaataggaatca

SEQ ID NO: 7660 - DNA, 201 bp, Homo sapiens
gttagcgtaaagttatcttttcttttttcctaatcagagttcttgaccctttggttattgagtttaaaacttcaattgaaattcaatagtatttatttttkaaaaaaatcactaaactgtgcctaaagaacataactgccatattaatgttttggtttatatcctctatagtaatagaaaaacatttaatacttgtaatgc

SEQ ID NO: 7661 - DNA, 201 bp, Homo sapiens
cagtatggtctgctcctaattactgctatcgttgtggaaatattgcttcgatcatggtcttcaaagatgtaaatacaagagaaccaaagttattccgggcrgttccagattcagaacgtgttattcctcccagaacgacaacgccatatttcctttgaggccttcgcccatcctgctgacccatttttctgccctcttctt

SEQ ID NO: 7662 - DNA, 201 bp, Homo sapiens
tttttgacatgctcacagtagcagctttaatagatgagcagattttgtgtgtccatggtggtttatctcctgatatcaaaacactggatcaaattcgaacyatcgaacggaatcaggaaattcctcataaaggagcattttgtgatctggtttggtcagatcctgaagatgtggatacctgggctatcagtccccgaggag

SEQ ID NO: 7663 - DNA, 201 bp, Homo sapiens
aaaacccacttttccccttcaggataagaacttccaggttacctaaaaatgcaataaaaatctttatagtctaagcttcttggcatataatttttcatcarggttttcttttattaattgagcacaatactgttttgatttaatttttttccctcaaaccacccagctccttacatagtttttaattatatagctatatga

SEQ ID NO: 7664 - DNA, 201 bp, Homo sapiens
taaaatcccttatgttgtatcaatgggggtaaaaactatttttatttgcctatgatatacttggtttctaataaagtgccctaggctctagtgagaactgkctactttgaattgccatttactccctttcctcctttggccgatatgctcttggctagctttttataagttaatgtgtttccccaaaaagtttcactactt

SEQ ID NO: 7665 - DNA, 201 bp, Homo sapiens
tggaaaatgcctgtactgtgaaagcaaattaggactctttctgagcctctttcattgtcagaaatagaatcactttccatcagcttccaggaaattgtgtrtctggagtcgaagagatttgacatcaagaatccagatttttaaatgtaattgttttttaaatgtgctatattccctcagtgtaaattaataaaaagatta

SEQ ID NO: 7666 - DNA, 201 bp, Homo sapiens
tcagggttttcttttattaattgagcacaatactgttttgatttaatttttttccctcaaaccacccagctccttacatagtttttaattatatagctatmtgaaagaggtggctaagacatttgctgcacacacttgaactaatgttgggtcagtagcttcgtgttactgccctgatcccagtgtaattcaggtggaaag

SEQ ID NO: 7667 - DNA, 201 bp, Homo sapiens
tgtatctggagtcgaagagatttgacatcaagaatccagatttttaaatgtaattgttttttaaatgtgctatattccctcagtgtaaattaataaaaagrttacaggaagtttgtcaaaaaattcaatgcatagtctgtagtatgtcctgacaagaagttagcattttatataagaaattaaaaaatgcttattcctcca

SEQ ID NO: 7668 - DNA, 201 bp, Homo sapiens
ccaataaataagggctatgtactatatgtactatatagagttatcatgtggtggaagatacttgcaagtcatagatttatgggcaggaggatttgttactscctatatctaggctgaatgtaaaatcccttatgttgtatcaatgggggtaaaaactatttttatttgcctatgatatacttggtttctaataaagtgccc

SEQ ID NO: 7669 - DNA, 201 bp, Homo sapiens; identical to SEQ ID NO: 7656

SEQ ID NO: 7670 - DNA, 201 bp, Homo sapiens
aaagcaaattaggactctttctgagcctctttcattgtcagaaatagaatcactttccatcagcttccaggaaattgtgtatctggagtcgaagagatttracatcaagaatccagatttttaaatgtaattgttttttaaatgctaatgtttgtaaagcaccttcagttcttcggatgaaaggtgctatattccctcagt

SEQ ID NO: 7671 - DNA, 201 bp, Homo sapiens; identical to SEQ ID NO: 7658

SEQ ID NO: 7672 - DNA, 201 bp, Homo sapiens; identical to SEQ ID NO: 7659

SEQ ID NO: 7673 - DNA, 201 bp, Homo sapiens; identical to SEQ ID NO: 7660

SEQ ID NO: 7674 - DNA, 201 bp, Homo sapiens; identical to SEQ ID NO: 7661

SEQ ID NO: 7675 - DNA, 201 bp, Homo sapiens; identical to SEQ ID NO: 7662

SEQ ID NO: 7676 - DNA, 201 bp, Homo sapiens; identical to SEQ ID NO: 7663

SEQ ID NO: 7677 - DNA, 201 bp, Homo sapiens; identical to SEQ ID NO: 7664

SEQ ID NO: 7678 - DNA, 201 bp, Homo sapiens
tggaaaatgcctgtactgtgaaagcaaattaggactctttctgagcctctttcattgtcagaaatagaatcactttccatcagcttccaggaaattgtgtrtctggagtcgaagagatttgacatcaagaatccagatttttaaatgtaattgttttttaaatgctaatgtttgtaaagcaccttcagttcttcggatgaa

SEQ ID NO: 7679 - DNA, 201 bp, Homo sapiens; identical to SEQ ID NO: 7666

SEQ ID NO: 7680 - DNA, 118 bp, Homo sapiens
tttttaaatgtaattgttttttaaatgctaatgtttgtaaagcaccttcagttcttcggatgaaaggtgctatattccctcagtgtaaattaataaaaagrttacaggaagtttgtca

SEQ ID NO: 7681 - DNA, 201 bp, Homo sapiens; identical to SEQ ID NO: 7668

SEQ ID NO: 7682 - DNA, 201 bp, Homo sapiens
tggctgtgggccaggaggtgtttgggctgcttcctgggctcatgctgtatgccacgctctggctacgtgagcacaaccgtgtgtgtgacctgctgaaggcygagcaccccacctggggcgatgagcagcttttccagacgacccgcctcatcctcataggggagaccatcaagattgtcatcgaggagtacgtgcagcagc

SEQ ID NO: 7683 - DNA, 201 bp, Homo sapiens
aagaatcttaatgcttgtaatttaaacatttgttcctggagttttgatttggtggatgtgatggttggttttatttgtcagtttggttgggctatagcacmcagttatttaatcaaacagtaatctaggtgtggctgtgaaggtattttgtagatgtgattaacatctacaatcagttgactttaagtgaaagagattact

SEQ ID NO: 7684 - DNA, 201 bp, Homo sapiens
cttcacccaccagttcttcaaaacttctggcaagatgggtcctggcttcaccaaggccttgggccatggggtagacctcggccacatttatggagacaatmtggagcgtcagtatcaactgcggctctttaaggatgggaaactcaagtaccaggtgctggatggagaaatgtacccgccctcggtagaagaggcgcctgt

SEQ ID NO: 7685 - DNA, 201 bp, Homo sapiens
tcctgctcaggaggaagttcatacctgacccccaaggcaccaacctcatgtttgccttctttgcacaacacttcacccaccagttcttcaaaacttctggmaagatgggtcctggcttcaccaaggccttgggccatggggtagacctcggccacatttatggagacaatctggagcgtcagtatcaactgcggctcttta

SEQ ID NO: 7686 - DNA, 201 bp, Homo sapiens
acctggctccggaattcactgcggcccagcccctctttcacccacttcctgctcactcacgggcgctggttctgggagtttgtcaatgccaccttcatccragagatgctcatgcgcctggtactcacagtgcgctccaaccttatccccagtccccccacctacaactcagcacatgactacatcagctgggagtctttc

SEQ ID NO: 7687 - DNA, 201 bp, Homo sapiens
ctcacagtgcgctccaaccttatccccagtccccccacctacaactcagcacatgactacatcagctgggagtctttctccaacgtgagctattacactcktattctgccctctgtgcctaaagattgccccacacccatgggaaccaaagggaagaagcagttgccagatgcccagctcctggcccgccgcttcctgctc

SEQ ID NO: 7688 - DNA, 201 bp, Homo sapiens
ccttatggagctcacactccagtggcagacaaacagaccataaataaggaaacgatgaaataagatatatacaaggtgagtgtgacttcccttctaacccyctctgctctgtcctcccctattgcgctctcaagaccagagacccaacagcagtgatctcagggcagacagccctccactccagctctgagacccttttct

SEQ ID NO: 7689 - DNA, 201 bp, Homo sapiens
acaacctagaatgtcagatttctggttgatttgtaacacagtcattctaggatgtggagctactgatgaaatctgctagaaagttagggggttcttatttkgcattccagaatcttgactttctgattggtgattcaaagtgttgtgttcctggctgatgatccagaacagtggctcgtatcccaaatctgtcagcatctg

SEQ ID NO: 7690 - DNA, 201 bp, Homo sapiens
gactttctgctgggatccttgggcccatcactgtatagacatgctaccactggtacttcctttctccctgcgggccaggcactgcccttttcaggaagctstcttaaaatacccattgccccagacctggaagatataacattcagttcccaccatctgattaaaacaacttcctcccttacagagcatacaacagagggg

SEQ ID NO: 7691 - DNA, 201 bp, Homo sapiens
gcaagaggtttggcatgaaaccctacacctccttccaggagctcgtaggagagaaggagatggcagcagagttggaggaattgtatggagacattgatgcrttggagttctaccctggactgcttcttgaaaagtgccatccaaactctatctttggggagagtatgatagagattggggctcccttttccctcaagggtc

SEQ ID NO: 7692 - DNA, 201 bp, Homo sapiens
cacctccatgttggtggactatggggttgaggccctggtggatgccttctctcgccagattgctggccggatcggtgggggcaggaacatggaccaccacrtcctgcatgtggctgtggatgtcatcagggagtctcgggagatgcggctgcagcccttcaatgagtaccgcaagaggtttggcatgaaaccctacacctc

SEQ ID NO: 7693 - DNA, 201 bp, Homo sapiens
tgtttgggctgcttcctgggctcatgctgtatgccacgctctggctacgtgagcacaaccgtgtgtgtgacctgctgaaggctgagcaccccacctggggygatgagcagcttttccagacgacccgcctcatcctcataggggagaccatcaagattgtcatcgaggagtacgtgcagcagctgagtggctatttcctgc

SEQ ID NO: 7694 - DNA, 201 bp, Homo sapiens
tgagactttctgctgggatccttgggcccatcactgtatagacatgctaccactggtacttcctttctccctgcgggccaggcactgcccttttcaggaakctctcttaaaatacccattgccccagacctggaagatataacattcagttcccaccatctgattaaaacaacttcctcccttacagagcatacaacagag

SEQ ID NO: 7695 - DNA, 201 bp, Homo sapiens
ccctctgtgcctaaagattgccccacacccatgggaaccaaagggaagaagcagttgccagatgcccagctcctggcccgccgcttcctgctcaggaggamgttcatacctgacccccaaggcaccaacctcatgtttgccttctttgcacaacacttcacccaccagttcttcaaaacttctggcaagatgggtcctggc

SEQ ID NO: 7696 - DNA, 201 bp, Homo sapiens
atctggaatattgtgattctgtttattcttccagaatgctgaactccttgttagcccttcagattgttaggagtggttctcatttggtctgccagaatackgggttcttagttgacaacctagaatgtcagatttctggttgatttgtaacacagtcattctaggatgtggagctactgatgaaatctgctagaaagttag

SEQ ID NO: 7697 - DNA, 201 bp, Homo sapiens
ttggtgattcaaagtgttgtgttcctggctgatgatccagaacagtggctcgtatcccaaatctgtcagcatctggctgtctagaatgtggatttgattcmttttcctgttcagtgagatatcatagagacggagatcctaaggtccaacaagaatgcattccctgaatctgtgcctgcactgagagggcaaggaagtggg

SEQ ID NO: 7698 - DNA, 201 bp, Homo sapiens
ggccagggctgatggtcttaaatgctcattttctggtttggcatggtgagtgttggggttgacatttagaactttaagtctcacccattatctggaatatygtgattctgtttattcttccagaatgctgaactccttgttagcccttcagattgttaggagtggttctcatttggtctgccagaatactgggttcttagt

SEQ ID NO: 7699 - DNA, 201 bp, Homo sapiens
tctggaggggagagctttgtgcttgtcattccagagtgctgaggccagggctgatggtcttaaatgctcattttctggtttggcatggtgagtgttggggytgacatttagaactttaagtctcacccattatctggaatattgtgattctgtttattcttccagaatgctgaactccttgttagcccttcagattgttag

SEQ ID NO: 7700 - DNA, 201 bp, Homo sapiens
ggaagggctttgagggtggaaggatgggatgggttccagaggtattcctctcttaaatgcaagtgcctagattaggtagactttgcttagtattgacaackgcacatgaaagttttgcaaagggaaacaggctaaatgcaccaagaaagcttcttcagagtgaagaatcttaatgcttgtaatttaaacatttgttcctgg

SEQ ID NO: 7701 - DNA, 201 bp, Homo sapiens
tgtggatgtcatcagggagtctcgggagatgcggctgcagcccttcaatgagtaccgcaagaggtttggcatgaaaccctacacctccttccaggagctcrtaggagagaaggagatggcagcagagttggaggaattgtatggagacattgatgcgttggagttctaccctggactgcttcttgaaaagtgccatccaaa

SEQ ID NO: 7702 - DNA, 201 bp, Homo sapiens
tgcgggccaggcactgcccttttcaggaagctctcttaaaatacccattgccccagacctggaagatataacattcagttcccaccatctgattaaaacarcttcctcccttacagagcatacaacagagggggcacccggggaggagagcacatactgtgttccaatttcacgcttttaattctcatttgttctcacacc

SEQ ID NO: 7703 - DNA, 201 bp, Homo sapiens
gttgttactatccatgccagcaccagggcatctgtgtccgcttcggccttgaccgctaccagtgtgactgcacccgcacgggctattccggccccaactgyaccatccctggcctgtggacctggctccggaattcactgcggcccagcccctctttcacccacttcctgctcactcacgggcgctggttctgggagtttg

SEQ ID NO: 7704 - DNA, 201 bp, Homo sapiens
gttatatatctcttttggtcccatcctctaaagcagaggcaacactggaacatggctagcctttcttgtagccatggctgggcgtgctagaggttgcagcrtgagactttctgctgggatccttgggcccatcactgtatagacatgctaccactggtacttcctttctccctgcgggccaggcactgcccttttcaggaa

SEQ ID NO: 7705 - DNA, 201 bp, Homo sapiens
ttatggctgctgggctgagtgacacaagcactttaatggcctggagggacttttaatcagtgaagatgcaatcagacaagtgttttggaaagagcaccctygagaagggtggatgacagggcagagcaggaaggacaggaagctggcagaacggaggaggctgcagccgtggtccaaccaggagctgatggcagctggggc

SEQ ID NO: 7706 - DNA, 201 bp, Homo sapiens
tgggctggagctccgggcagtgtgcgaggcgcacgcacaggagcctgcactctgcgtcccgcaccccagcagccgcgccatgagccggagtctcttgctcyggttcttgctgttcctgctcctgctcccgccgctccccgtcctgctcgcggacccaggggcgcccacgccagtgaatccctgttgttactatccatgcca

SEQ ID NO: 7707 - DNA, 201 bp, Homo sapiens
ggttcttgctgttcctgctcctgctcccgccgctccccgtcctgctcgcggacccaggggcgcccacgccagtgaatccctgttgttactatccatgccarcaccagggcatctgtgtccgcttcggccttgaccgctaccagtgtgactgcacccgcacgggctattccggccccaactgcaccatccctggcctgtgga

SEQ ID NO: 7708 - DNA, 201 bp, Homo sapiens
gcccttctcaagactttagcttttccttccatccggtggcctattccaggaattcctcttttgcttaaatcagttggagtttgtgtctgttgcttgtaatmaagcctttatggctgctgggctgagtgacacaagcactttaatggcctggagggacttttaatcagtgaagatgcaatcagacaagtgttttggaaagag

SEQ ID NO: 7709 - DNA, 201 bp, Homo sapiens
ttcagttcccaccatctgattaaaacaacttcctcccttacagagcatacaacagagggggcacccggggaggagagcacatactgtgttccaatttcacscttttaattctcatttgttctcacaccaacagtgtgaagtgcgtggtataatctccatttcaaaaccaaggaagcagcctcagagtggtcgagtgacaca

SEQ ID NO: 7710 - DNA, 201 bp, Homo sapiens
gattcattttcctgttcagtgagatatcatagagacggagatcctaaggtccaacaagaatgcattccctgaatctgtgcctgcactgagagggcaaggargtggggtgttcttcttgggacccccactaagaccctggtctgaggatgtagagagaacaggtgggctgtattcacgccattggttggaagctaccagagc

SEQ ID NO: 7711 - DNA, 201 bp, Homo sapiens
ttaatcagtgaagatgcaatcagacaagtgttttggaaagagcaccctcgagaagggtggatgacagggcagagcaggaaggacaggaagctggcagaackgaggaggctgcagccgtggtccaaccaggagctgatggcagctggggctaggggaagggctttgagggtggaaggatgggatgggttccagaggtattcc

SEQ ID NO: 7712 - DNA, 201 bp, Homo sapiens
atttggtggatgtgatggttggttttatttgtcagtttggttgggctatagcacacagttatttaatcaaacagtaatctaggtgtggctgtgaaggtatkttgtagatgtgattaacatctacaatcagttgactttaagtgaaagagattacttaaataatttgggtgagctgcacctgattagttgaaaggcctcaag

SEQ ID NO: 7713 - DNA, 201 bp, Homo sapiens
gcgcacgcacaggagcctgcactctgcgtcccgcaccccagcagccgcgccatgagccggagtctcttgctccggttcttgctgttcctgctcctgctccygccgctccccgtcctgctcgcggacccaggggcgcccacgccagtgaatccctgttgttactatccatgccagcaccagggcatctgtgtccgcttcggc

SEQ ID NO: 7714 - DNA, 201 bp, Homo sapiens
gaggtattcctctcttaaatgcaagtgcctagattaggtagactttgcttagtattgacaactgcacatgaaagttttgcaaagggaaacaggctaaatgyaccaagaaagcttcttcagagtgaagaatcttaatgcttgtaatttaaacatttgttcctggagttttgatttggtggatgtgatggttggttttatttg

SEQ ID NO: 7715 - DNA, 201 bp, Homo sapiens
ggctcccaggagtacagctacgagcagttcttgttcaacacctccatgttggtggactatggggttgaggccctggtggatgccttctctcgccagattgytggccggatcggtgggggcaggaacatggaccaccacatcctgcatgtggctgtggatgtcatcagggagtctcgggagatgcggctgcagcccttcaat

SEQ ID NO: 7716 - DNA, 201 bp, Homo sapiens
ttttcctaagtgtttactatgtgccagttcctgtaacaggtgtggggacacagcagtgagtaatcaatacagacaaggttctgcccttatggagctcacaytccagtggcagacaaacagaccataaataaggaaacgatgaaataagatatatacaaggtgagtgtgacttcccttctaaccccctctgctctgtcctcc

SEQ ID NO: 7717 - DNA, 201 bp, Homo sapiens
tgaaaccctacacctccttccaggagctcgtaggagagaaggagatggcagcagagttggaggaattgtatggagacattgatgcgttggagttctacccyggactgcttcttgaaaagtgccatccaaactctatctttggggagagtatgatagagattggggctcccttttccctcaagggtctcctagggaatccca

SEQ ID NO: 7718 - DNA, 201 bp, Homo sapiens
ccacagagctctgaggggcaggaaagcagcattctggaggggagagctttgtgcttgtcattccagagtgctgaggccagggctgatggtcttaaatgctmattttctggtttggcatggtgagtgttggggttgacatttagaactttaagtctcacccattatctggaatattgtgattctgtttattcttccagaatg

SEQ ID NO: 7719 - DNA, 201 bp, Homo sapiens
agaaagttagggggttcttattttgcattccagaatcttgactttctgattggtgattcaaagtgttgtgttcctggctgatgatccagaacagtggctcrtatcccaaatctgtcagcatctggctgtctagaatgtggatttgattcattttcctgttcagtgagatatcatagagacggagatcctaaggtccaacaa

SEQ ID NO: 7720 - DNA, 201 bp, Homo sapiens
tcctgcatgtggctgtggatgtcatcagggagtctcgggagatgcggctgcagcccttcaatgagtaccgcaagaggtttggcatgaaaccctacacctcyttccaggagctcgtaggagagaaggagatggcagcagagttggaggaattgtatggagacattgatgcgttggagttctaccctggactgcttcttgaaa

SEQ ID NO: 7721 - DNA, 166 bp, Homo sapiens
aggtgacagctggagggaggagcgggggtggagccgggggaagggtggggaggggatgggctggasctccgggcagtgtgcgaggcgcacgcacaggagcctgcactctgcgtcccgcaccccagcagccgcgccatgagccggagtctcttgctccggttcttgc

SEQ ID NO: 7722 - DNA, 201 bp, Homo sapiens
gggctgagtgacacaagcactttaatggcctggagggacttttaatcagtgaagatgcaatcagacaagtgttttggaaagagcaccctcgagaagggtgratgacagggcagagcaggaaggacaggaagctggcagaacggaggaggctgcagccgtggtccaaccaggagctgatggcagctggggctaggggaaggg

SEQ ID NO: 7723 - DNA, 201 bp, Homo sapiens
cccgtcctgctcgcggacccaggggcgcccacgccagtgaatccctgttgttactatccatgccagcaccagggcatctgtgtccgcttcggccttgaccrctaccagtgtgactgcacccgcacgggctattccggccccaactgcaccatccctggcctgtggacctggctccggaattcactgcggcccagcccctct

SEQ ID NO: 7724 - DNA, 201 bp, Homo sapiens
cggtgggggcaggaacatggaccaccacatcctgcatgtggctgtggatgtcatcagggagtctcgggagatgcggctgcagcccttcaatgagtaccgcragaggtttggcatgaaaccctacacctccttccaggagctcgtaggagagaaggagatggcagcagagttggaggaattgtatggagacattgatgcgtt

SEQ ID NO: 7725 - DNA, 201 bp, Homo sapiens
cagcttttccagacgacccgcctcatcctcataggggagaccatcaagattgtcatcgaggagtacgtgcagcagctgagtggctatttcctgcagctgaratttgacccagagctgctgttcggtgtccagttccaataccgcaaccgcattgccatggagttcaaccatctctaccactggcaccccctcatgcctgac

SEQ ID NO: 7726 - DNA, 201 bp, Homo sapiens; identical to SEQ ID NO: 7682

SEQ ID NO: 7727 - DNA, 201 bp, Homo sapiens; identical to SEQ ID NO: 7683

SEQ ID NO: 7728 - DNA, 201 bp, Homo sapiens; identical to SEQ ID NO: 7684

SEQ ID NO: 7729 - DNA, 201 bp, Homo sapiens; identical to SEQ ID NO: 7685

SEQ ID NO: 7730 - DNA, 201 bp, Homo sapiens; identical to SEQ ID NO: 7686

SEQ ID NO: 7731 - DNA, 201 bp, Homo sapiens; identical to SEQ ID NO: 7687

SEQ ID NO: 7732 - DNA, 201 bp, Homo sapiens; identical to SEQ ID NO: 7688

SEQ ID NO: 7733 - DNA, 201 bp, Homo sapiens; identical to SEQ ID NO: 7689

SEQ ID NO: 7734 - DNA, 201 bp, Homo sapiens; identical to SEQ ID NO: 7690

SEQ ID NO: 7735 - DNA, 201 bp, Homo sapiens; identical to SEQ ID NO: 7691

SEQ ID NO: 7736 - DNA, 201 bp, Homo sapiens
ccgcaaccgcattgccatggagttcaaccatctctaccactggcaccccctcatgcctgactccttcaagatcggtgggggcaggaacatggaccaccacrtcctgcatgtggctgtggatgtcatcagggagtctcgggagatgcggctgcagcccttcaatgagtaccgcaagaggtttggcatgaaaccctacacctc

SEQ ID NO: 7737 - DNA, 201 bp, Homo sapiens; identical to SEQ ID NO: 7693

SEQ ID NO: 7738 - DNA, 201 bp, Homo sapiens; identical to SEQ ID NO: 7694

SEQ ID NO: 7739 - DNA, 201 bp, Homo sapiens; identical to SEQ ID NO: 7695

SEQ ID NO: 7740 - DNA, 201 bp, Homo sapiens; identical to SEQ ID NO: 7696

SEQ ID NO: 7741 - DNA, 201 bp, Homo sapiens; identical to SEQ ID NO: 7697

SEQ ID NO: 7742 - DNA, 201 bp, Homo sapiens; identical to SEQ ID NO: 7698

SEQ ID NO: 7743 - DNA, 201 bp, Homo sapiens; identical to SEQ ID NO: 7699

SEQ ID NO: 7744 - DNA, 201 bp, Homo sapiens; identical to SEQ ID NO: 7700

SEQ ID NO: 7745 - DNA, 201 bp, Homo sapiens; identical to SEQ ID NO: 7701

SEQ ID NO: 7746 - DNA, 201 bp, Homo sapiens; identical to SEQ ID NO: 7702

SEQ ID NO: 7747 - DNA, 201 bp, Homo sapiens; identical to SEQ ID NO: 7703

SEQ ID NO: 7748 - DNA, 201 bp, Homo sapiens; identical to SEQ ID NO: 7704

SEQ ID NO: 7749 - DNA, 201 bp, Homo sapiens; identical to SEQ ID NO: 7705

SEQ ID NO: 7750 - DNA, 201 bp, Homo sapiens; identical to SEQ ID NO: 7706

SEQ ID NO: 7751 - DNA, 201 bp, Homo sapiens; identical to SEQ ID NO: 7707

SEQ ID NO: 7752 - DNA, 201 bp, Homo sapiens; identical to SEQ ID NO: 7708

SEQ ID NO: 7753 - DNA, 201 bp, Homo sapiens; identical to SEQ ID NO: 7709

SEQ ID NO: 7754 - DNA, 201 bp, Homo sapiens; identical to SEQ ID NO: 7710

SEQ ID NO: 7755 - DNA, 201 bp, Homo sapiens; identical to SEQ ID NO: 7711

SEQ ID NO: 7756 - DNA, 201 bp, Homo sapiens; identical to SEQ ID NO: 7712

SEQ ID NO: 7757 - DNA, 201 bp, Homo sapiens; identical to SEQ ID NO: 7713

SEQ ID NO: 7758 - DNA, 201 bp, Homo sapiens; identical to SEQ ID NO: 7714

SEQ ID NO: 7759 - DNA, 201 bp, Homo sapiens; identical to SEQ ID NO: 7716

SEQ ID NO: 7760 - DNA, 201 bp, Homo sapiens; identical to SEQ ID NO: 7717

SEQ ID NO: 7761 - DNA, 201 bp, Homo sapiens; identical to SEQ ID NO: 7718

SEQ ID NO: 7762 - DNA, 201 bp, Homo sapiens; identical to SEQ ID NO: 7719

SEQ ID NO: 7763 - DNA, 201 bp, Homo sapiens; identical to SEQ ID NO: 7720

SEQ ID NO: 7764 - DNA, 166 bp, Homo sapiens; identical to SEQ ID NO: 7721

SEQ ID NO: 7765 - DNA, 201 bp, Homo sapiens; identical to SEQ ID NO: 7722

SEQ ID NO: 7766 - DNA, 201 bp, Homo sapiens; identical to SEQ ID NO: 7723

SEQ ID NO: 7767 - DNA, 201 bp, Homo sapiens; identical to SEQ ID NO: 7724

SEQ ID NO: 7768 - DNA, 201 bp, Homo sapiens; identical to SEQ ID NO: 7725

SEQ ID NO: 7769 - DNA, 201 bp, Homo sapiens
tgctgtgagaattctcctttgagatttcagaagaaaggaaacaatgtgattcaagatatttacataccagaagcatctaggactgatggatcactgtcccrattcaaattattcttcagtccatttccccttcctatttcagctgttccttttcacctaactgttcagtcattctggttttcaagcagtgctttatctcat

SEQ ID NO: 7770 - DNA, 196 bp, Homo sapiens
gccatcgcgccattcctagttaaggcggcacagggccgaggcgtagtgtgggtgactcctccgttccttgggtcccgtcgtctgtgatactgcagygcagccatggcagaaccgcagcccccgtccggcggcctcacggacgaggccgccctcagttgctgctccgacgcggaccccagtaccaaggattttctat

SEQ ID NO: 7771 - DNA, 195 bp, Homo sapiens
atgactatatttagatttctctagactctagtggaagacctttggaaaggccatgccaaccgtgcttgtactgctagaagcactttatgtttcctttttgrgtgaaatggatttatgtgagtgctttaaacaaatagcaatacttatagactgaaataaaatgaaacttcaaataagactatgtttaatttgtaa

SEQ ID NO: 7772 - DNA, 201 bp, Homo sapiens
aaaaatgacatccctaaagaaaaagatgaaaaaatagcctgggcgctctccagaaaagctacacttgagctgacacacaattggggcactgaagatgatgmgacccagagttaccacaatggcaattcagaccctcgaggattcggtcatattggaattgctgttcctgatgtatacagtgcttgtaaaaggtttgaagaa

SEQ ID NO: 7773 - DNA, 141 bp, Homo sapiens
gccatcgcgccattcctagttaaggcggcacagggccgagkcgtagtgtgggtgactcctccgttccttgggtcccgtcgtctgtgatactgcagtgcagccatggcagaaccgcagcccccgtccggcggcctcacggac

SEQ ID NO: 7774 - DNA, 201 bp, Homo sapiens
tactgatagaaaaagtgatttcttcttattataaagtacatttaaagttcaaggactaaccttatttatttgggaaaggggaggaggaaggaaatgatatkgtacccagacactgggctaggctgcaactttatctcatttaatactcccagctgtcatgtgagaaagaaagcaggctaggcatgtgaaatcactttcatg

SEQ ID NO: 7775 - DNA, 201 bp, Homo sapiens
gggcgctctccagaaaagctacacttgagctgacacacaattggggcactgaagatgatgagacccagagttaccacaatggcaattcagaccctcgaggwttcggtcatattggaattgctgttcctgatgtatacagtgcttgtaaaaggtttgaagaactgggagtcaaatttgtgaagaaacctgatgatggtaaaa

SEQ ID NO: 7776 - DNA, 201 bp, Homo sapiens
cagtgcagccatggcagaaccgcagcccccgtccggcggcctcacggacgaggccgccctcagttgctgctccgacgcggaccccagtaccaaggattttytattgcagcagaccatgctacgagtgaaggatcctaagaagtcactggatttttatactagagttcttggaatgacgctaatccaaaaatgtgattttcc

SEQ ID NO: 7777 - DNA, 201 bp, Homo sapiens; identical to SEQ ID NO: 7769

SEQ ID NO: 7778 - DNA, 196 bp, Homo sapiens; identical to SEQ ID NO: 7770

SEQ ID NO: 7779 - DNA, 178 bp, Homo sapiens
atgactatatttagatttctctagactctagtggaagacctttggaaaggccatgccaaccgtgcttgtactgctagaagcactttatgtttcctttttgrgtgaaatggatttatgtgagtgctttaaacaaatagcaatacttatagactgaaataaaatgaaacttcaaataaga

SEQ ID NO: 7780 - DNA, 201 bp, Homo sapiens; identical to SEQ ID NO: 7772

SEQ ID NO: 7781 - DNA, 141 bp, Homo sapiens; identical to SEQ ID NO: 7773

SEQ ID NO: 7782 - DNA, 201 bp, Homo sapiens
ttacaaaagagtaggtactcttgagagcaattcaaatcatgctgacaaggatactgatagaaaaattatttgggaaaggggaggaggaaggaaatgatatkgtacccagacactgggctaggctgcaactttatctcatttaatactcccagctgtcatgtgagaaagaaagcaggctaggcatgtgaaatcactttcatg

SEQ ID NO: 7783 - DNA, 201 bp, Homo sapiens; identical to SEQ ID NO: 7775

SEQ ID NO: 7784 - DNA, 201 bp, Homo sapiens; identical to SEQ ID NO: 7776

SEQ ID NO: 7785 - DNA, 201 bp, Homo sapiens
caagacattttagagctgggcaaaacctgtgtaggtctcgctgtgggtttgctggggaccaagggggtgatgaaaaggggaggggcggagctcctgcccargagaggggctgtggggccccaggataaaacagacacagtgacagggccaagagccagcactgctggccttggtgtcatgccagaatctaccaggactgag

SEQ ID NO: 7786 - DNA, 201 bp, Homo sapiens
gccgtgcggacatgaccaagaaccggacggtggactgggcgttggcagagtacatggcctttggctccctgctgaaggaaggcatccacgtgcggctcagygggcaggatgtggagaggggcacattcagtcaccggcaccatgttctccatgaccaggaggttgaccgcaggacgtgtgtgcctatgaatcatctctggc

SEQ ID NO: 7787 - DNA, 201 bp, Homo sapiens
atcggcagtgtggccagctctgtgcccctggaggactttaagatccacactggcctctctcgcattctgcggggccgtgcggacatgaccaagaaccggayggtggactgggcgttggcagagtacatggcctttggctccctgctgaaggaaggcatccacgtgcggctcagcgggcaggatgtggagaggggcacattc

SEQ ID NO: 7788 - DNA, 201 bp, Homo sapiens
tagggagttcagcagtaacagccaggtgaagcgaacctgctgggtgatttgtttgcgctctgttttatggggcattcctgcgagatgtgtcagcttctgtrtgaaatgcagccacagctcatgtgtaccaaagtagaaaaccaaatcacagagaaataaaaacatgcttcagagagatttgctgttttcatttcatgttgt

SEQ ID NO: 7789 - DNA, 201 bp, Homo sapiens
cgggaccagcttccagcgggtgattcctgaagatggggccgcagcacgggcccctgagcaggtgcagcggctcatcttctgcacgggaaaggtgtactatracctggtgaaggagcggagcagccaggacctggaggagaaagtggccatcacgcgcctggagcagatctctccattccccttcgacctgatcaagcagga

SEQ ID NO: 7790 - DNA, 201 bp, Homo sapiens
acatgcccagccacggggatccctgaggacatgctcacccacatcggcagtgtggccagctctgtgcccctggaggactttaagatccacactggcctctstcgcattctgcggggccgtgcggacatgaccaagaaccggacggtggactgggcgttggcagagtacatggcctttggctccctgctgaaggaaggcatc

SEQ ID NO: 7791 - DNA, 201 bp, Homo sapiens
tgtgggtttgctggggaccaagggggtgatgaaaaggggaggggcggagctcctgcccaagagaggggctgtggggccccaggataaaacagacacagtgwcagggccaagagccagcactgctggccttggtgtcatgccagaatctaccaggactgagggagccagaggagtcctgtaggcaggctactgtgctggagc

SEQ ID NO: 7792 - DNA, 201 bp, Homo sapiens
cccaggataaaacagacacagtgacagggccaagagccagcactgctggccttggtgtcatgccagaatctaccaggactgagggagccagaggagtcctrtaggcaggctactgtgctggagcatcccccagctgctcccatcttgctggaatttcttgggcggcttctccacctgtatctcaagacagacacccggggg

SEQ ID NO: 7793 - DNA, 201 bp, Homo sapiens
tcacacctaaatctctgctgaggcacccagaggccaagtccagctttgaccaaatggtatccgggaccagcttccagcgggtgattcctgaagatggggcygcagcacgggcccctgagcaggtgcagcggctcatcttctgcacgggaaaggtgtactatgacctggtgaaggagcggagcagccaggacctggaggaga

SEQ ID NO: 7794 - DNA, 201 bp, Homo sapiens
tggtcaactgctccacaccggccaactacttccacgtgctgcgccggcagatcctgctgcccttccgcaagccgctgattatcttcacacctaaatctctkctgaggcacccagaggccaagtccagctttgaccaaatggtatccgggaccagcttccagcgggtgattcctgaagatggggccgcagcacgggcccctg

SEQ ID NO: 7795 - DNA, 201 bp, Homo sapiens
ccattgataaactggccttctatgaccttcaggaggctgaccttgataaggagttccagctgccgacaaccaccttcattgggggctctgaaaacaccctytctctgcgggagatcattcggcgcctggagaacacctactgccagcacattggcctggagttcatgttcatcaacgatgtggagcagtgccagtggatcc

SEQ ID NO: 7796 - DNA, 201 bp, Homo sapiens
catctctggcctgaccaggccccgtacaccgtgtgcaacagctccctctcggagtacggagtcctgggctttgagctgggctatgccatggccagccccartgccctggtcctctgggaggcccagtttggggacttccacaacacggcccagtgcatcatcgaccagttcatcagcaccggccaggccaagtgggtgcgg

SEQ ID NO: 7797 - DNA, 201 bp, Homo sapiens
tcattgggggctctgaaaacaccctttctctgcgggagatcattcggcgcctggagaacacctactgccagcacattggcctggagttcatgttcatcaaygatgtggagcagtgccagtggatccggcagaagtttgagacccctggtgtgatgcagttctccagcgaggagaagcggaccctgctggcccggctagtgc

SEQ ID NO: 7798 - DNA, 201 bp, Homo sapiens
acaccctttctctgcgggagatcattcggcgcctggagaacacctactgccagcacattggcctggagttcatgttcatcaacgatgtggagcagtgccartggatccggcagaagtttgagacccctggtgtgatgcagttctccagcgaggagaagcggaccctgctggcccggctagtgcgctccatgaggtttgaag

SEQ ID NO: 7799 - DNA, 201 bp, Homo sapiens
atataaagcactggttggactccccctggcctggcttcttcaacgtagatggggagcccaagagcatgacatgcccagccacggggatccctgaggacatsctcacccacatcggcagtgtggccagctctgtgcccctggaggactttaagatccacactggcctctctcgcattctgcggggccgtgcggacatgacca

SEQ ID NO: 7800 - DNA, 201 bp, Homo sapiens
ggatgccacacaggggaaggctgaacgtgctggccaacgtgatccgcaaggacctggagcagatcttctgccagtttgaccccaagctggaggcggcggaygagggctccggggatgtcaagtaccacctgggcatgtaccatgagaggatcaaccgcgtcaccaaccggaacatcactctgtcgctggttgccaacccct

SEQ ID NO: 7801 - DNA, 201 bp, Homo sapiens
actcacctggtgtcactgaagaagtttctggatactgccttcaatctccaggcctttgagggcaagacattttagagctgggcaaaacctgtgtaggtctygctgtgggtttgctggggaccaagggggtgatgaaaaggggaggggcggagctcctgcccaagagaggggctgtggggccccaggataaaacagacacag

SEQ ID NO: 7802 - DNA, 201 bp, Homo sapiens
gtttgaccccaagctggaggcggcggacgagggctccggggatgtcaagtaccacctgggcatgtaccatgagaggatcaaccgcgtcaccaaccggaacmtcactctgtcgctggttgccaacccctcccacctggaggcagtggaccctgtggtgcaggggaagacaaaggcagagcagttctaccgtggagatgccca

SEQ ID NO: 7803 - DNA, 201 bp, Homo sapiens
ctccggggatgtcaagtaccacctgggcatgtaccatgagaggatcaaccgcgtcaccaaccggaacatcactctgtcgctggttgccaacccctcccacytggaggcagtggaccctgtggtgcaggggaagacaaaggcagagcagttctaccgtggagatgcccagggcaagaaggtcatgtccatcctggttcatgg

SEQ ID NO: 7804 - DNA, 201 bp, Homo sapiens; identical to SEQ ID NO: 7785

SEQ ID NO: 7805 - DNA, 201 bp, Homo sapiens; identical to SEQ ID NO: 7786

SEQ ID NO: 7806 - DNA, 201 bp, Homo sapiens; identical to SEQ ID NO: 7787

SEQ ID NO: 7807 - DNA, 201 bp, Homo sapiens; identical to SEQ ID NO: 7788

SEQ ID NO: 7808 - DNA, 201 bp, Homo sapiens; identical to SEQ ID NO: 7789

SEQ ID NO: 7809 - DNA, 201 bp, Homo sapiens; identical to SEQ ID NO: 7790

SEQ ID NO: 7810 - DNA, 201 bp, Homo sapiens; identical to SEQ ID NO: 7791

SEQ ID NO: 7811 - DNA, 201 bp, Homo sapiens; identical to SEQ ID NO: 7792

SEQ ID NO: 7812 - DNA, 201 bp, Homo sapiens; identical to SEQ ID NO: 7793

SEQ ID NO: 7813 - DNA, 201 bp, Homo sapiens; identical to SEQ ID NO: 7794

SEQ ID NO: 7814 - DNA, 201 bp, Homo sapiens; identical to SEQ ID NO: 7795

SEQ ID NO: 7815 - DNA, 201 bp, Homo sapiens; identical to SEQ ID NO: 7796

SEQ ID NO: 7816 - DNA, 201 bp, Homo sapiens; identical to SEQ ID NO: 7797

SEQ ID NO: 7817 - DNA, 201 bp, Homo sapiens; identical to SEQ ID NO: 7798

SEQ ID NO: 7818 - DNA, 201 bp, Homo sapiens; identical to SEQ ID NO: 7799

SEQ ID NO: 7819 - DNA, 201 bp, Homo sapiens; identical to SEQ ID NO: 7800

SEQ ID NO: 7820 - DNA, 201 bp, Homo sapiens; identical to SEQ ID NO: 7801

SEQ ID NO: 7821 - DNA, 201 bp, Homo sapiens; identical to SEQ ID NO: 7802

SEQ ID NO: 7822 - DNA, 201 bp, Homo sapiens; identical to SEQ ID NO: 7803

SEQ ID NO: 7823 - DNA, 201 bp, Homo sapiens; identical to SEQ ID NO: 7785

SEQ ID NO: 7824 - DNA, 201 bp, Homo sapiens; identical to SEQ ID NO: 7786

SEQ ID NO: 7825 - DNA, 201 bp, Homo sapiens; identical to SEQ ID NO: 7787

SEQ ID NO: 7826 - DNA, 201 bp, Homo sapiens; identical to SEQ ID NO: 7788

SEQ ID NO: 7827 - DNA, 201 bp, Homo sapiens; identical to SEQ ID NO: 7789

SEQ ID NO: 7828 - DNA, 201 bp, Homo sapiens; identical to SEQ ID NO: 7790

SEQ ID NO: 7829 - DNA, 201 bp, Homo sapiens; identical to SEQ ID NO: 7791

SEQ ID NO: 7830 - DNA, 201 bp, Homo sapiens; identical to SEQ ID NO: 7792

SEQ ID NO: 7831 - DNA, 201 bp, Homo sapiens; identical to SEQ ID NO: 7793

SEQ ID NO: 7832 - DNA, 201 bp, Homo sapiens; identical to SEQ ID NO: 7794

SEQ ID NO: 7833 - DNA, 201 bp, Homo sapiens; identical to SEQ ID NO: 7795

SEQ ID NO: 7834 - DNA, 201 bp, Homo sapiens; identical to SEQ ID NO: 7796

SEQ ID NO: 7835 - DNA, 201 bp, Homo sapiens; identical to SEQ ID NO: 7797

SEQ ID NO: 7836 - DNA, 201 bp, Homo sapiens; identical to SEQ ID NO: 7798

SEQ ID NO: 7837 - DNA, 201 bp, Homo sapiens; identical to SEQ ID NO: 7799

SEQ ID NO: 7838 - DNA, 201 bp, Homo sapiens; identical to SEQ ID NO: 7800

SEQ ID NO: 7839 - DNA, 201 bp, Homo sapiens; identical to SEQ ID NO: 7801

SEQ ID NO: 7840 - DNA, 201 bp, Homo sapiens; identical to SEQ ID NO: 7802

SEQ ID NO: 7841 - DNA, 201 bp, Homo sapiens; identical to SEQ ID NO: 7803

SEQ ID NO: 7842 - DNA, 201 bp, Homo sapiens
ttccacaaacaagtacttcaaaagggaaagtcatgcttaaagaatacagtggacgcaagattgaagtagagcacatttttaaatggataactgctcatgcrgcttctcggatcaaaaccatttataatgctgaacacttgaaagaagaatggaataaaagtgatcagtattggttaaaaatatacctatttgcaaaccttg

SEQ ID NO: 7843 - DNA, 201 bp, Homo sapiens
ttgtggtttgaagtttagtttaatgttagtgcagtgacgggaaatacacattatgctaatgttgatgacagaatttatttggttgccttgtgtgttaattkaatgcatacctaattgtaaaatttttttatttacaacattggaaattcagaagttaatgtttttttgtaagcacaaaagaagtattatagaaatttatcc

SEQ ID NO: 7844 - DNA, 201 bp, Homo sapiens
cctctgataccaactgattatattaaaaacttaccaatgtggcgatttaaatgtcttggagtccagtctgaagaggaaatgtcggaggggtctcaagataytgaaaatgactcggaaagtgagaacacagacactttgagtagtgagaaggaagtatttgaagataagcaaagcgtacttcacaattctccaggaacagca

SEQ ID NO: 7845 - DNA, 201 bp, Homo sapiens
gaaactggcatctttgccacccagctggtggatccggtggcgctgagcttcaagaagctgaagaccattttggagtgccgggggttgggctactcagggtkgcccgagaagaaggatgtccgggagctggtggaaaatgttattcttttcctttcttcaggtgacttgatggagggtgagctctattctgctctcaaggaa

SEQ ID NO: 7846 - DNA, 201 bp, Homo sapiens
tcccatcttaaccatgtgcaatttgtcctttataagctttgagtatcttacagcttgcctttttaatgttagtcacaatgtttttgtggtttgaagtttaktttaatgttagtgcagtgacgggaaatacacattatgctaatgttgatgacagaatttatttggttgccttgtgtgttaattgaatgcatacctaattgt

SEQ ID NO: 7847 - DNA, 201 bp, Homo sapiens
cacctgcttccccgccggggatggccggccagtgacggcgccgggtggcccgcgcgtggacacggggccctcgcccaagctgccaccgagccgcggccccygccctcgacccttctctctcccgtattccgagctctctggaaagagaggagactccagggaagatgtggctgaagctttttttcttgctcctctatttcc

SEQ ID NO: 7848 - DNA, 201 bp, Homo sapiens; identical to SEQ ID NO: 7842

SEQ ID NO: 7849 - DNA, 201 bp, Homo sapiens
gtggacacggggccctcgcccaagctgccaccgagccgcggcccccgccctcgacccttctctctcccgtattccgagctctctggaaagagaggagactmcagggaagatgtggctgaagctttttttcttgctcctctatttcctggtcctgttcgtcctggccaggttttttgaggccattgtgtggtatgaaactgg

SEQ ID NO: 7850 - DNA, 201 bp, Homo sapiens; identical to SEQ ID NO: 7843

SEQ ID NO: 7851 - DNA, 201 bp, Homo sapiens; identical to SEQ ID NO: 7844

SEQ ID NO: 7852 - DNA, 201 bp, Homo sapiens
gaaactggcatctttgccacccagctggtggatccggtggcgctgagcttcaagaagctgaagaccattttggagtgccgggggttgggctactcagggtkgcccgagaagaaggatgtccgggagctggtggaaaagtcaggtgacttgatggagggtgagctctattctgctctcaaggaagaagaagcatccgaatcg

SEQ ID NO: 7853 - DNA, 201 bp, Homo sapiens
gcgcgtggacacggggccctcgcccaagctgccaccgagccgcggcccccgccctcgacccttctctctcccgtattccgagctctctggaaagagaggaractccagggaagatgtggctgaagctttttttcttgctcctctatttcctggtcctgttcgtcctggccaggttttttgaggccattgtgtggtatgaaa

SEQ ID NO: 7854 - DNA, 201 bp, Homo sapiens; identical to SEQ ID NO: 7846

SEQ ID NO: 7855 - DNA, 201 bp, Homo sapiens
actgcagagccaggaaaactttgaagccttcatgaaggcaatcggtctgccggaagagctcatccagaaggggaaggatatcaagggggtgtcggaaatcvtgcagaatgggaagcacttcaagttcaccatcaccgctgggtccaaagtgatccaaaacgaattcacggtgggggaggaatgtgagctggagacaatgac

SEQ ID NO: 7856 - DNA, 171 bp, Homo sapiens
aaaaacatcaagtctgtgaccgaactcaacggcgacataatcaccaataccatgacattgggtgacattgtcttcaagagaatcagcaagagaatttaaasaagtctgcatttcatattattttagtgtgtaaaattaatgtaataaagtgaactttgttttaaaaaaaaa

SEQ ID NO: 7857 - DNA, 201 bp, Homo sapiens
aaacgaattcacggtgggggaggaatgtgagctggagacaatgacaggggagaaagtcaagacagtggttcagttggaaggtgacaataaactggtgacarctttcaaaaacatcaagtctgtgaccgaactcaacggcgacataatcaccaataccatgacattgggtgacattgtcttcaagagaatcagcaagagaat

SEQ ID NO: 7858 - DNA, 201 bp, Homo sapiens
ggcaatcggtctgccggaagagctcatccagaaggggaaggatatcaagggggtgtcggaaatcgtgcagaatgggaagcacttcaagttcaccatcaccrctgggtccaaagtgatccaaaacgaattcacggtgggggaggaatgtgagctggagacaatgacaggggagaaagtcaagacagtggttcagttggaagg

SEQ ID NO: 7859 - DNA, 201 bp, Homo sapiens
tgcagagccaggaaaactttgaagccttcatgaaggcaatcggtctgccggaagagctcatccagaaggggaaggatatcaagggggtgtcggaaatcgtkcagaatgggaagcacttcaagttcaccatcaccgctgggtccaaagtgatccaaaacgaattcacggtgggggaggaatgtgagctggagacaatgacag

SEQ ID NO: 7860 - DNA, 131 bp, Homo sapiens
aggggaggtgaagcatggggagcggctcacataccctaatgccacccctccaccctccaacccccaaacttctttcctgtggtcagtatctgccagcactwactgaggatccatcatgtcccaggcagttt

SEQ ID NO: 7861 - DNA, 201 bp, Homo sapiens
ttagcaaggctcttgccccccaccaccccttcctcacaggtcacctctctgttccctgcagacagtggttcagttggaaggtgacaataaactggtgacarctttcaaaaacatcaagtctgtgaccgaactcaacggcgacataatcaccaatgtaagttggtggtgctctgagcgtgtggctcccagtgcttgagggga

SEQ ID NO: 7862 - DNA, 201 bp, Homo sapiens
gcctacaatcccagcactttgggaggctgaagtgaaaggactgtttgagcctaggagttcaagaccagcctgggcaacatagcaagacctcatctcaattaaaaaaaaaaaaaaaagaagaatacataccaaagcaaaatatgtattctctactggtcaatatttgaattttgccactacctccctccattagcttgggag

SEQ ID NO: 7863 - DNA, 201 bp, Homo sapiens
tggtcaagggatttaactatgggccttttccaaattttctttttggaggcaaaatgtttaatgttgcccagggtctttggctccctgctgggttcctgtcrtctcttccaggatgtataagggcttggaaggaggccacaatatgaaaagttaacgctctgggaagaataatacatacctggttgggcgggtggctcatgc

SEQ ID NO: 7864 - DNA, 175 bp, Homo sapiens
gttggtggtgctctgagcgtgtggctcccagtgcttgaggggagaggggaggtgaagcatggggagcggctcacataccctaatgccacccctccaccctycaacccccaaacttctttcctgtggtcagtatctgccagcacttactgaggatccatcatgtcccaggcagttt

SEQ ID NO: 7865 - DNA, 201 bp, Homo sapiens
ggcaatcggtctgccggaagagctcatccagaaggggaaggatatcaagggggtgtcggaaatcgtgcagaatgggaagcacttcaagttcaccatcaccrctgggtccaaagtgatccaaaacgaattcacggtgggggaggaatgtgagctggagacaatgacaggggagaaagtcaaggtaggagggcatcccttctg

SEQ ID NO: 7866 - DNA, 201 bp, Homo sapiens
caggagtggggcaagtgggagtttgtgaaaaacccttaactgagcccaaagtcaactggccttcactgaacctagagctggtggtgatagggagagacttyttgaaggaggtgctagcaataccagaataccagggccccagacaggtgctcagaccctgccttcaggggtggtcacaaagtctctggcttcagccacccc

SEQ ID NO: 7867 - DNA, 201 bp, Homo sapiens; identical to SEQ ID NO: 7859

SEQ ID NO: 7868 - DNA, 201 bp, Homo sapiens; identical to SEQ ID NO: 7855

SEQ ID NO: 7869 - DNA, 201 bp, Homo sapiens
agtatttttttgaggctgtttctacccagatggaaaagtggtatgaaaggaagattgaagaagcacgaagccaagccaatcagaaagcccagcaagataargctacattgaaggaacacattaaaagtttagaagaggaacttgccaaactaaggactagggtgcagaaggaaaattagcaccaataaagaggaaatatga

SEQ ID NO: 7870 - DNA, 201 bp, Homo sapiens
tggccagaaaagaagaagccagagaagagttcctgtcagcctccccagaacccagagcaaaggatgacaggaggagaaagtcaaggcccaaggtgtcagcrttttctgaccccaccccaccagccgaccaacagcctggacaccagaagaacctgcatgctcataatcaccctaaaaagaggaacaggcatcggtgttcat

SEQ ID NO: 7871 - DNA, 201 bp, Homo sapiens
ggacggagtgcctgaaccgcctgcaacagcactcagacacagagaagcatgagggggagaaacgacagatatccttggtggatgaattaaaaacctggtgyatgttaaagattcagaatctggagcagaagctttctggagattctagggcctgcagagctaaatccacaccatctacttgtgagtcctctacaggtgtgg

SEQ ID NO: 7872 - DNA, 201 bp, Homo sapiens
gttggaggctactgtggaggagataaaagcagagctgggatcggttcaggacaaaatgaatacaaagctggggcagatggagaataagacccagcaccaamtgcgtgttttggacaagctgatggttgagcgactttctgcagagaggacggagtgcctgaaccgcctgcaacagcactcagacacagagaagcatgaggg

SEQ ID NO: 7873 - DNA, 201 bp, Homo sapiens
ttataaacagcaaggaatatgttctgctttctgcaattttagaaagtcattccattctgggtgacagaatgaggtaagactgtctctttaaaaaaaaaaamaactcacacctgtaatcctagcactctggccaccgaggcaggtggattgcttgagcccaggagtttgagactagcctggcaacaaagtgagattccccct

SEQ ID NO: 7874 - DNA, 201 bp, Homo sapiens
attccattctgggtgacagaatgaggtaagactgtctctttaaaaaaaaaaacaactcacacctgtaatcctagcactctggccaccgaggcaggtggatygcttgagcccaggagtttgagactagcctggcaacaaagtgagattccccctcctctctctgaaaagtaaaaaaaattagccggtcatggtggcatatgc

SEQ ID NO: 7875 - DNA, 201 bp, Homo sapiens
atctgatcagcaggctgggccctgcgtcaacagaggcactcaaactaagaagtctgggaagagtgggccaacaaggcatcgtgcccagcaacccgcagccrgcagcacctgtgggcagccgccaccagccacaggcagcgagcagactggccctcacattcgggacacctcccaagctctggagcttacccagtatttttt

SEQ ID NO: 7876 - DNA, 201 bp, Homo sapiens
ggattgcttgagcccaggagtttgagactagcctggcaacaaagtgagattccccctcctctctctgaaaagtaaaaaaaattagccggtcatggtggcayatgcctgtggtcccagctaaatgaaaatctgaagcaggtggatctcttgagcccaggagctcaaggttgcagtgagccatgttcgcgccaccacactcca

SEQ ID NO: 7877 - DNA, 201 bp, Homo sapiens
catccacgaagggtgtgccctggacagacaagacaaggatgggaatacagccttgcatgaagcatcctggcatggtttcagccagtcagccaagctgctcrttaaagcaggagccaacgtgcttgccaagaacaaggcggggaacacagctctgcacctggcctgccagaacagccactcccagagcacgcgcgtcctcct

SEQ ID NO: 7878 - DNA, 201 bp, Homo sapiens
gcagccagatctgatcagcaggctgggccctgcgtcaacagaggcactcaaactaagaagtctgggaagagtgggccaacaaggcatcgtgcccagcaacycgcagccagcagcacctgtgggcagccgccaccagccacaggcagcgagcagactggccctcacattcgggacacctcccaagctctggagcttacccag

SEQ ID NO: 7879 - DNA, 201 bp, Homo sapiens
acagggtcttgctctgtcacccagactggagtgcagtggcatgatcacacctcactgcagccttggcctctcaggctcgtgatcctcctgcctcaacctcscaagtagcttgggactacaggcgtgtgccaccagtcctggctaattttttgtagatataaggtctcatgatattgcccaggctgaatttgatgttatttc

SEQ ID NO: 7880 - DNA, 201 bp, Homo sapiens
cctttgatacgactataatattataaacagcaaggaatatgttctgctttctgcaattttagaaagtcattccattctgggtgacagaatgaggtaagactgtctctttaaaaaaaaaaacaactcacacctgtaatcctagcactctggccaccgaggcaggtggattgcttgagcccaggagtttgagactagcctggc

SEQ ID NO: 7881 - DNA, 201 bp, Homo sapiens
ctttgatacgactataatattataaacagcaaggaatatgttctgctttctgcaattttagaaagtcattccattctgggtgacagaatgaggtaagactgtctctttaaaaaaaaaaacaactcacacctgtaatcctagcactctggccaccgaggcaggtggattgcttgagcccaggagtttgagactagcctggca

SEQ ID NO: 7882 - DNA, 201 bp, Homo sapiens
cagccagatctgatcagcaggctgggccctgcgtcaacagaggcactcaaactaagaagtctgggaagagtgggccaacaaggcatcgtgcccagcaaccygcagccagcagcacctgtgggcagccgccaccagccacaggcagcgagcagactggccctcacattcgggacacctcccaagctctggagcttacccagt

SEQ ID NO: 7883 - DNA, 201 bp, Homo sapiens
ctgccctaaatcacaagaaggtggccaaaatcttactggaagccggagcagatacgaccattgttaacaatgcaggccagactccgctggagactgcccgmtaccacaataacccggaagttgctcttctccttactaaagctccccagggcagtgtctcagcaggagacacccccagcagtgaacaggctgtggccagaa

SEQ ID NO: 7884 - DNA, 201 bp, Homo sapiens
agaggcactcaaactaagaagtctgggaagagtgggccaacaaggcatcgtgcccagcaacccgcagccagcagcacctgtgggcagccgccaccagccasaggcagcgagcagactggccctcacattcgggacacctcccaagctctggagcttacccagtatttttttgaggctgtttctacccagatggaaaagtgg

SEQ ID NO: 7885 - DNA, 201 bp, Homo sapiens
gctttctggagattctagggcctgcagagctaaatccacaccatctacttgtgagtcctctacaggtgtggaccaattagtggtgactgcaggtccagcarcagcttccgacagctcccctccagtggttaggcccaaagagaaggccctcaactccactgctacccagagactccagcaggagctgtcatcttctgactg

SEQ ID NO: 7886 - DNA, 201 bp, Homo sapiens
gtccatgaaaagaaccaggctggagacacagcacttcacgttgctgctgccctaaatcacaagaaggtggccaaaatcttactggaagccggagcagataygaccattgttaacaatgcaggccagactccgctggagactgcccgctaccacaataacccggaagttgctcttctccttactaaagctccccagggcagt

SEQ ID NO: 7887 - DNA, 201 bp, Homo sapiens
tttataacctattcctaatcaaacccaattatatcagaatacctttctgaatttgagatttttgctctacattttataatgaataaggctattttttgaargtatttcattttgaattctgtcattaacctcaaaagctttctactgctttgcggtgaaggcaaaatattcgataactcaacttaggccccactgttcccc

SEQ ID NO: 7888 - DNA, 201 bp, Homo sapiens
ggagatcatcgcggcgctcatccacgaagggtgtgccctggacagacaagacaaggatgggaatacagccttgcatgaagcatcctggcatggtttcagcsagtcagccaagctgctcgttaaagcaggagccaacgtgcttgccaagaacaaggcggggaacacagctctgcacctggcctgccagaacagccactccca

SEQ ID NO: 7889 - DNA, 201 bp, Homo sapiens
ttgaccacattttatggctcctgagtgccttcacccagctacactttaccttgtatctataaaagtgtaatttagagtaaatacattggctgtaaagtcgmgatcaggtgctctccaccaaaagcaaaacaaaactgctgaaatgtggcaaggtttctcagtgcaagcttaaatgtttaaactgttgaccatttggaaaat

SEQ ID NO: 7890 - DNA, 201 bp, Homo sapiens
gaatgaggtaagactgtctctttaaaaaaaaaaacaactcacacctgtaatcctagcactctggccaccgaggcaggtggattgcttgagcccaggagttygagactagcctggcaacaaagtgagattccccctcctctctctgaaaagtaaaaaaaattagccggtcatggtggcatatgcctgtggtcccagctaaat

SEQ ID NO: 7891 - DNA, 201 bp, Homo sapiens
tcatcgcggcgctcatccacgaagggtgtgccctggacagacaagacaaggatgggaatacagccttgcatgaagcatcctggcatggtttcagccagtcrgccaagctgctcgttaaagcaggagccaacgtgcttgccaagaacaaggcggggaacacagctctgcacctggcctgccagaacagccactcccagagca

SEQ ID NO: 7892 - DNA, 201 bp, Homo sapiens
caggtccagcagcagcttccgacagctcccctccagtggttaggcccaaagagaaggccctcaactccactgctacccagagactccagcaggagctgtcrtcttctgactgtacaggctcccgactgagaaacgtcaaggtccagacagccttgctacccatgaatgaggcagccagatctgatcagcaggctgggccct

SEQ ID NO: 7893 - DNA, 201 bp, Homo sapiens
caaagagaagaaatgatttattaacatggggacaccaagaaaaacaaagtatgcttttattccctttgtcaagctcagttttagggttttttctttttttkatagtgacaatccatagatatagacattcctaaaagaaaaataaataattcagtagatatatgtcactgttacctgaatatggaatgaatttgatgtttt

SEQ ID NO: 7894 - DNA, 201 bp, Homo sapiens
cagcaagataaggctacattgaaggaacacattaaaagtttagaagaggaacttgccaaactaaggactagggtgcagaaggaaaattagcaccaataaaraggaaatatgaaaggattcttgaagatttccagttttgcaactgcataatagctatgcccaaggagtcaactattgtatatattgcagatttgccttttt

SEQ ID NO: 7895 - DNA, 201 bp, Homo sapiens; identical to SEQ ID NO: 7869

SEQ ID NO: 7896 - DNA, 201 bp, Homo sapiens; identical to SEQ ID NO: 7870

SEQ ID NO: 7897 - DNA, 201 bp, Homo sapiens; identical to SEQ ID NO: 7871

SEQ ID NO: 7898 - DNA, 201 bp, Homo sapiens; identical to SEQ ID NO: 7872

SEQ ID NO: 7899 - DNA, 201 bp, Homo sapiens; identical to SEQ ID NO: 7873

SEQ ID NO: 7900 - DNA, 201 bp, Homo sapiens; identical to SEQ ID NO: 7874

SEQ ID NO: 7901 - DNA, 201 bp, Homo sapiens; identical to SEQ ID NO: 7875

SEQ ID NO: 7902 - DNA, 201 bp, Homo sapiens; identical to SEQ ID NO: 7876

SEQ ID NO: 7903 - DNA, 201 bp, Homo sapiens
catccacgaagggtgtgccctggacagacaagacaaggatgggaatacagccttgcatgaagcatcctggcatggtttcagccagtcagccaagctgctcrttaaagcaggagccaacgtgcttgccaagaacaagggcagtgtctcagcaggagacacccccagcagtgaacaggctgtggccagaaaagaagaagccag

SEQ ID NO: 7904 - DNA, 201 bp, Homo sapiens; identical to SEQ ID NO: 7878

SEQ ID NO: 7905 - DNA, 201 bp, Homo sapiens; identical to SEQ ID NO: 7879

SEQ ID NO: 7906 - DNA, 201 bp, Homo sapiens; identical to SEQ ID NO: 7880

SEQ ID NO: 7907 - DNA, 201 bp, Homo sapiens; identical to SEQ ID NO: 7881

SEQ ID NO: 7908 - DNA, 201 bp, Homo sapiens; identical to SEQ ID NO: 7882

SEQ ID NO: 7909 - DNA, 201 bp, Homo sapiens; identical to SEQ ID NO: 7884

SEQ ID NO: 7910 - DNA, 201 bp, Homo sapiens; identical to SEQ ID NO: 7885

SEQ ID NO: 7911 - DNA, 201 bp, Homo sapiens; identical to SEQ ID NO: 7887

SEQ ID NO: 7912 - DNA, 201 bp, Homo sapiens
ggagatcatcgcggcgctcatccacgaagggtgtgccctggacagacaagacaaggatgggaatacagccttgcatgaagcatcctggcatggtttcagcsagtcagccaagctgctcgttaaagcaggagccaacgtgcttgccaagaacaagggcagtgtctcagcaggagacacccccagcagtgaacaggctgtggc

SEQ ID NO: 7913 - DNA, 201 bp, Homo sapiens; identical to SEQ ID NO: 7889

SEQ ID NO: 7914 - DNA, 201 bp, Homo sapiens; identical to SEQ ID NO: 7890

SEQ ID NO: 7915 - DNA, 201 bp, Homo sapiens
tcatcgcggcgctcatccacgaagggtgtgccctggacagacaagacaaggatgggaatacagccttgcatgaagcatcctggcatggtttcagccagtcrgccaagctgctcgttaaagcaggagccaacgtgcttgccaagaacaagggcagtgtctcagcaggagacacccccagcagtgaacaggctgtggccagaa

SEQ ID NO: 7916 - DNA, 201 bp, Homo sapiens; identical to SEQ ID NO: 7892

SEQ ID NO: 7917 - DNA, 201 bp, Homo sapiens; identical to SEQ ID NO: 7893

SEQ ID NO: 7918 - DNA, 201 bp, Homo sapiens; identical to SEQ ID NO: 7894

SEQ ID NO: 7919 - DNA, 201 bp, Homo sapiens; identical to SEQ ID NO: 7869

SEQ ID NO: 7920 - DNA, 201 bp, Homo sapiens; identical to SEQ ID NO: 7870

SEQ ID NO: 7921 - DNA, 201 bp, Homo sapiens; identical to SEQ ID NO: 7871

SEQ ID NO: 7922 - DNA, 201 bp, Homo sapiens; identical to SEQ ID NO: 7872

SEQ ID NO: 7923 - DNA, 201 bp, Homo sapiens; identical to SEQ ID NO: 7873

SEQ ID NO: 7924 - DNA, 201 bp, Homo sapiens; identical to SEQ ID NO: 7874

SEQ ID NO: 7925 - DNA, 201 bp, Homo sapiens; identical to SEQ ID NO: 7875

SEQ ID NO: 7926 - DNA, 201 bp, Homo sapiens; identical to SEQ ID NO: 7876

SEQ ID NO: 7927 - DNA, 201 bp, Homo sapiens; identical to SEQ ID NO: 7877

SEQ ID NO: 7928 - DNA, 201 bp, Homo sapiens; identical to SEQ ID NO: 7878

SEQ ID NO: 7929 - DNA, 201 bp, Homo sapiens; identical to SEQ ID NO: 7879

SEQ ID NO: 7930 - DNA, 201 bp, Homo sapiens; identical to SEQ ID NO: 7880

SEQ ID NO: 7931 - DNA, 201 bp, Homo sapiens; identical to SEQ ID NO: 7881

SEQ ID NO: 7932 - DNA, 201 bp, Homo sapiens; identical to SEQ ID NO: 7882

SEQ ID NO: 7933 - DNA, 201 bp, Homo sapiens
ctgccctaaatcacaagaaggtggccaaaatcttactggaagccggagcagatacgaccattgttaacaatgcaggccagactccgctggagactgcccgmtaccacaataacccggaagttgctcttctccttactaaagctccccaggtcttgcgcttcagtcgtgggcgaagcctgaggaaaaagagagagaggctca

SEQ ID NO: 7934 - DNA, 201 bp, Homo sapiens; identical to SEQ ID NO: 7884

SEQ ID NO: 7935 - DNA, 201 bp, Homo sapiens; identical to SEQ ID NO: 7885

SEQ ID NO: 7936 - DNA, 201 bp, Homo sapiens
gtccatgaaaagaaccaggctggagacacagcacttcacgttgctgctgccctaaatcacaagaaggtggccaaaatcttactggaagccggagcagataygaccattgttaacaatgcaggccagactccgctggagactgcccgctaccacaataacccggaagttgctcttctccttactaaagctccccaggtcttg

SEQ ID NO: 7937 - DNA, 201 bp, Homo sapiens; identical to SEQ ID NO: 7887

SEQ ID NO: 7938 - DNA, 201 bp, Homo sapiens; identical to SEQ ID NO: 7888

SEQ ID NO: 7939 - DNA, 201 bp, Homo sapiens; identical to SEQ ID NO: 7889

SEQ ID NO: 7940 - DNA, 201 bp, Homo sapiens; identical to SEQ ID NO: 7890

SEQ ID NO: 7941 - DNA, 201 bp, Homo sapiens; identical to SEQ ID NO: 7891

SEQ ID NO: 7942 - DNA, 201 bp, Homo sapiens; identical to SEQ ID NO: 7892

SEQ ID NO: 7943 - DNA, 201 bp, Homo sapiens; identical to SEQ ID NO: 7893

SEQ ID NO: 7944 - DNA, 201 bp, Homo sapiens; identical to SEQ ID NO: 7894

SEQ ID NO: 7945 - DNA, 201 bp, Homo sapiens; identical to SEQ ID NO: 7869

SEQ ID NO: 7946 - DNA, 201 bp, Homo sapiens; identical to SEQ ID NO: 7870

SEQ ID NO: 7947 - DNA, 201 bp, Homo sapiens; identical to SEQ ID NO: 7872

SEQ ID NO: 7948 - DNA, 201 bp, Homo sapiens; identical to SEQ ID NO: 7871

SEQ ID NO: 7949 - DNA, 201 bp, Homo sapiens; identical to SEQ ID NO: 7873

SEQ ID NO: 7950 - DNA, 201 bp, Homo sapiens; identical to SEQ ID NO: 7876

SEQ ID NO: 7951 - DNA, 201 bp, Homo sapiens; identical to SEQ ID NO: 7875

SEQ ID NO: 7952 - DNA, 201 bp, Homo sapiens; identical to SEQ ID NO: 7874

SEQ ID NO: 7953 - DNA, 201 bp, Homo sapiens; identical to SEQ ID NO: 7877

SEQ ID NO: 7954 - DNA, 201 bp, Homo sapiens; identical to SEQ ID NO: 7878

SEQ ID NO: 7955 - DNA, 201 bp, Homo sapiens; identical to SEQ ID NO: 7879

SEQ ID NO: 7956 - DNA, 201 bp, Homo sapiens; identical to SEQ ID NO: 7880

SEQ ID NO: 7957 - DNA, 201 bp, Homo sapiens; identical to SEQ ID NO: 7882

SEQ ID NO: 7958 - DNA, 201 bp, Homo sapiens; identical to SEQ ID NO: 7881

SEQ ID NO: 7959 - DNA, 201 bp, Homo sapiens; identical to SEQ ID NO: 7883

SEQ ID NO: 7960 - DNA, 201 bp, Homo sapiens; identical to SEQ ID NO: 7884

SEQ ID NO: 7961 - DNA, 201 bp, Homo sapiens; identical to SEQ ID NO: 7885

SEQ ID NO: 7962 - DNA, 201 bp, Homo sapiens; identical to SEQ ID NO: 7887

SEQ ID NO: 7963 - DNA, 201 bp, Homo sapiens; identical to SEQ ID NO: 7886

SEQ ID NO: 7964 - DNA, 201 bp, Homo sapiens; identical to SEQ ID NO: 7888

SEQ ID NO: 7965 - DNA, 201 bp, Homo sapiens; identical to SEQ ID NO: 7889

SEQ ID NO: 7966 - DNA, 201 bp, Homo sapiens; identical to SEQ ID NO: 7890

SEQ ID NO: 7967 - DNA, 201 bp, Homo sapiens; identical to SEQ ID NO: 7892

SEQ ID NO: 7968 - DNA, 108 bp, Homo sapiens
cttgttcygaaatcattgttcattttgcattcacagcatggccggactcccctgcatcttgctgccaataagggccatcttcctgtggtccagatcttgctgaaggct

SEQ ID NO: 7969 - DNA, 201 bp, Homo sapiens; identical to SEQ ID NO: 7893

SEQ ID NO: 7970 - DNA, 201 bp, Homo sapiens; identical to SEQ ID NO: 7891

SEQ ID NO: 7971 - DNA, 201 bp, Homo sapiens; identical to SEQ ID NO: 7894

SEQ ID NO: 7972 - DNA, 156 bp, Homo sapiens
cttttaaaatatttaaaatattttcaagataaagtattatcttctctgcaaaaattcctggagtaattttctctcataatatttgaagtcagtggttctcrgttgtattagtggggtaactacatcaaaataaataaagtcttatttttaaaatgc

SEQ ID NO: 7973 - DNA, 201 bp, Homo sapiens
aaaacttggttctgctttatataaacagtagagattattgtactataagtgattttgcctttttgccaaaatcctggaactcatctataattaacctcttmggagcaataccttaggttgggccttgctttactacttagaaatagctaaatttcaattttaaaaatctttgtgtgttataactgttaaattattcaataa

SEQ ID NO: 7974 - DNA, 201 bp, Homo sapiens
gtcctagaaaggaaattgcatgatgaatctagattgtctttagagtaaagaaacacattcaaattcctgtaacttatcactttcagtgagtaaatttactyataccaaaggggattttttttctttcaggaatctaaggaaatttactttttaacctgagaaaaaaacttggttctgctttatataaacagtagagattat

SEQ ID NO: 7975 - DNA, 201 bp, Homo sapiens
tactccaaggccccacccccaatttagcaagcagaaaaacgttccttgtatcactttaccttggataattgggtgccattaacacaaacaggtcacaatcytgctgttttctagccctgtccaccataatgagattcaggaaacatcctgtcagcctcctggaaagcatccttgtctccttagtatttcatttacaaacta

SEQ ID NO: 7976 - DNA, 201 bp, Homo sapiens
atacaattgatgtgtgctggggtttggaactaaaagtagtttcaacagtgcgtgggttatgacatttcttatgtttctttgttcatgtgtgtatttagtarttaattttaagatgtcctagtgatctttaaaagaaaaatattgtaccattttttagaattacactttcacctttctttttgcaattgaaagtgatgatgt

SEQ ID NO: 7977 - DNA, 201 bp, Homo sapiens
ttcaagactggaaagggaatatgagtgtaagtttactatatataaagctaagatgtggatttacaggaagaaccctggtttgaataactgatctgaaattmgtagttacctgtaaatggcagatcttttaggaaaataagagaaaggtaagggctcttttgaataaactgctgttttatttgtggcacaactgatcaatct

SEQ ID NO: 7978 - DNA, 201 bp, Homo sapiens
agatatgggaaaagtcagtaaaaatgatactgaagaggaaagtaataaatccgccacaacagacaatgaaataagtaggactgagtatttatgtgaaaackctctagaaggtaaaaataaagataattcttcaaatgaagtcttcccccaaggagcagaagaaagaatgtgttaccaatgtgagagtgaagatgaaccaca

SEQ ID NO: 7979 - DNA, 201 bp, Homo sapiens
ctacagctgtcaccagattttaccttcactgctggccttgctgcagaagtggctgctagatctctctcctttaccaccatgcaggaacagacttttggtgrtgaggaggaagaacaaataatagaagaaaataaaaatgagatagaagaaaagtaagaaccaagattcatatgaagtgatattagattgttccttttacaa

SEQ ID NO: 7980 - DNA, 201 bp, Homo sapiens
atgaaccacaagcagatggaagtggtctgaccactgcccctccaactcccagggactcattacagccctccattaagcagaggctggcacggctacagctstcaccagattttaccttcactgctggccttgctgcagaagtggctgctagatctctctcctttaccaccatgcaggaacagacttttggtgatgaggagg

SEQ ID NO: 7981 - DNA, 201 bp, Homo sapiens
taagaaccaagattcatatgaagtgatattagattgttccttttacaaaagtgtttagcttcaagactggaaagggaatatgagtgtaagtttactatatrtaaagctaagatgtggatttacaggaagaaccctggtttgaataactgatctgaaattagtagttacctgtaaatggcagatcttttaggaaaataagag

SEQ ID NO: 7982 - DNA, 201 bp, Homo sapiens
aagatgaacttgaaaagcttgtttgtactaaagaaacacaagaactagtgtcagaggcttatcccatcctagaacagaaattaaagttgattcagccccaygttcaagcaagcaacaattgctgggaagaggccatttctcaggtcgacaaactgctacgaagaaatacagataaaaaaggcaagcctgaaatagcatgtg

SEQ ID NO: 7983 - DNA, 201 bp, Homo sapiens
actagtgtcagaggcttatcccatcctagaacagaaattaaagttgattcagccccacgttcaagcaagcaacaattgctgggaagaggccatttctcagrtcgacaaactgctacgaagaaatacagataaaaaaggcaagcctgaaatagcatgtgaaaacccacattgtacagtagtacctttgaagcagcctactct

SEQ ID NO: 7984 - DNA, 201 bp, Homo sapiens
tgaatgaggtaataattcttgaagatgaacttgaaaagcttgtttgtactaaagaaacacaagaactagtgtcagaggcttatcccatcctagaacagaarttaaagttgattcagccccacgttcaagcaagcaacaattgctgggaagaggccatttctcaggtcgacaaactgctacgaagaaatacagataaaaaag

SEQ ID NO: 7985 - DNA, 201 bp, Homo sapiens
ggaaaatggacaccttccaacactttgctccctggcaacccctaatatttgggatctctcaatgctatttgccttcattagcttgctcgttatgcttcccrcttggtggattgtgtcttcctggctggtatggggagtgattctatttgtgtatctggtcataagagctttgagattatggaggacagccaaactacaagt

SEQ ID NO: 7986 - DNA, 201 bp, Homo sapiens
atccaagagggtgctccaagaattaaaatctgtgctgggatttaaagcttcagaggcagaaaggcagaagtggaagcaacttctatttagtgatcatgccrtgttgaaatccttgtctcctgtagacccagtggaacccataagtaattcagaaccatcaatgaattcagatatgggaaaagtcagtaaaaatgatactga

SEQ ID NO: 7987 - DNA, 201 bp, Homo sapiens; identical to SEQ ID NO: 7977

SEQ ID NO: 7988 - DNA, 201 bp, Homo sapiens; identical to SEQ ID NO: 7978

SEQ ID NO: 7989 - DNA, 201 bp, Homo sapiens; identical to SEQ ID NO: 7979

SEQ ID NO: 7990 - DNA, 201 bp, Homo sapiens
ttctttcattagggtcttgttaggtggttggcaagtaagttaaattgtatgttgcatttttttccatgctgttttaacttgtaaatatatatgtatacatrtggaagatattattattatctagattactttaagccttttatctgatgtattatcagtgaaaaccatgctgcttattccctaatacaatggttctcaaac

SEQ ID NO: 7991 - DNA, 201 bp, Homo sapiens; identical to SEQ ID NO: 7980

SEQ ID NO: 7992 - DNA, 201 bp, Homo sapiens; identical to SEQ ID NO: 7981

SEQ ID NO: 7993 - DNA, 201 bp, Homo sapiens; identical to SEQ ID NO: 7982

SEQ ID NO: 7994 - DNA, 201 bp, Homo sapiens; identical to SEQ ID NO: 7983

SEQ ID NO: 7995 - DNA, 201 bp, Homo sapiens; identical to SEQ ID NO: 7984

SEQ ID NO: 7996 - DNA, 201 bp, Homo sapiens; identical to SEQ ID NO: 7985

SEQ ID NO: 7997 - DNA, 201 bp, Homo sapiens
ttctttttaagaaaaaaactgagagtttgaattaaaagtttaaatcattgctaggtccttagttattttttttcttttttctttttttttatttgaagccrtgttgaaatccttgtctcctgtagacccagtggaacccataagtaattcagaaccatcaatgaattcagatatgggaaaagtcagtaaaaatgatactga

SEQ ID NO: 7998 - DNA, 156 bp, Homo sapiens; identical to SEQ ID NO: 7972

SEQ ID NO: 7999 - DNA, 201 bp, Homo sapiens; identical to SEQ ID NO: 7973

SEQ ID NO: 8000 - DNA, 201 bp, Homo sapiens; identical to SEQ ID NO: 7974

SEQ ID NO: 8001 - DNA, 201 bp, Homo sapiens; identical to SEQ ID NO: 7975

SEQ ID NO: 8002 - DNA, 201 bp, Homo sapiens; identical to SEQ ID NO: 7976

SEQ ID NO: 8003 - DNA, 201 bp, Homo sapiens; identical to SEQ ID NO: 7977

SEQ ID NO: 8004 - DNA, 201 bp, Homo sapiens; identical to SEQ ID NO: 7978

SEQ ID NO: 8005 - DNA, 201 bp, Homo sapiens; identical to SEQ ID NO: 7979

SEQ ID NO: 8006 - DNA, 201 bp, Homo sapiens; identical to SEQ ID NO: 7980

SEQ ID NO: 8007 - DNA, 201 bp, Homo sapiens; identical to SEQ ID NO: 7981

SEQ ID NO: 8008 - DNA, 201 bp, Homo sapiens; identical to SEQ ID NO: 7982

SEQ ID NO: 8009 - DNA, 201 bp, Homo sapiens; identical to SEQ ID NO: 7983

SEQ ID NO: 8010 - DNA, 201 bp, Homo sapiens; identical to SEQ ID NO: 7984

SEQ ID NO: 8011 - DNA, 201 bp, Homo sapiens; identical to SEQ ID NO: 7985

SEQ ID NO: 8012 - DNA, 201 bp, Homo sapiens; identical to SEQ ID NO: 7986

SEQ ID NO: 8013 - DNA, 156 bp, Homo sapiens; identical to SEQ ID NO: 7972

SEQ ID NO: 8014 - DNA, 201 bp, Homo sapiens; identical to SEQ ID NO: 7973

SEQ ID NO: 8015 - DNA, 201 bp, Homo sapiens; identical to SEQ ID NO: 7974

SEQ ID NO: 8016 - DNA, 201 bp, Homo sapiens; identical to SEQ ID NO: 7975

SEQ ID NO: 8017 - DNA, 201 bp, Homo sapiens; identical to SEQ ID NO: 7976

SEQ ID NO: 8018 - DNA, 201 bp, Homo sapiens; identical to SEQ ID NO: 7977

SEQ ID NO: 8019 - DNA, 201 bp, Homo sapiens; identical to SEQ ID NO: 7978

SEQ ID NO: 8020 - DNA, 201 bp, Homo sapiens; identical to SEQ ID NO: 7979

SEQ ID NO: 8021 - DNA, 201 bp, Homo sapiens; identical to SEQ ID NO: 7980

SEQ ID NO: 8022 - DNA, 201 bp, Homo sapiens; identical to SEQ ID NO: 7981

SEQ ID NO: 8023 - DNA, 201 bp, Homo sapiens; identical to SEQ ID NO: 7982

SEQ ID NO: 8024 - DNA, 201 bp, Homo sapiens; identical to SEQ ID NO: 7983

SEQ ID NO: 8025 - DNA, 201 bp, Homo sapiens; identical to SEQ ID NO: 7984

SEQ ID NO: 8026 - DNA, 201 bp, Homo sapiens; identical to SEQ ID NO: 7985

SEQ ID NO: 8027 - DNA, 201 bp, Homo sapiens; identical to SEQ ID NO: 7986

SEQ ID NO: 8028 - DNA, 201 bp, Homo sapiens; identical to SEQ ID NO: 7977

SEQ ID NO: 8029 - DNA, 201 bp, Homo sapiens; identical to SEQ ID NO: 7978

SEQ ID NO: 8030 - DNA, 201 bp, Homo sapiens; identical to SEQ ID NO: 7979

SEQ ID NO: 8031 - DNA, 201 bp, Homo sapiens; identical to SEQ ID NO: 7990

SEQ ID NO: 8032 - DNA, 201 bp, Homo sapiens; identical to SEQ ID NO: 7980

SEQ ID NO: 8033 - DNA, 201 bp, Homo sapiens; identical to SEQ ID NO: 7981

SEQ ID NO: 8034 - DNA, 201 bp, Homo sapiens; identical to SEQ ID NO: 7982

SEQ ID NO: 8035 - DNA, 201 bp, Homo sapiens; identical to SEQ ID NO: 7983

SEQ ID NO: 8036 - DNA, 201 bp, Homo sapiens; identical to SEQ ID NO: 7984

SEQ ID NO: 8037 - DNA, 201 bp, Homo sapiens; identical to SEQ ID NO: 7985

SEQ ID NO: 8038 - DNA, 201 bp, Homo sapiens; identical to SEQ ID NO: 7997

SEQ ID NO: 8039 - DNA, 201 bp, Homo sapiens; identical to SEQ ID NO: 7982

SEQ ID NO: 8040 - DNA, 201 bp, Homo sapiens; identical to SEQ ID NO: 7983

SEQ ID NO: 8041 - DNA, 201 bp, Homo sapiens
gcccaggcgcggcggcacatgcttgtaatatcagcacgttgggaagctgaggcgggtggatcatttgaggtcaggagttcaagaccagcctggccaacatrgcgaaaccccatctctactaaaaatacaaaaattaacaaggcatggtggcgcgtgcctgtagtcccagctactcgagaggctgaggcaggagaatcactt

SEQ ID NO: 8042 - DNA, 201 bp, Homo sapiens; identical to SEQ ID NO: 7984

SEQ ID NO: 8043 - DNA, 201 bp, Homo sapiens
attctcaactctgttgtccatatgttaaaatatttaaaaatacctcagtgaagcacaaaattaataactgtgctcacattgaaaaaaatggcccaggcgcrgcggcacatgcttgtaatatcagcacgttgggaagctgaggcgggtggatcatttgaggtcaggagttcaagaccagcctggccaacatggcgaaacccc

SEQ ID NO: 8044 - DNA, 201 bp, Homo sapiens; identical to SEQ ID NO: 7985

SEQ ID NO: 8045 - DNA, 201 bp, Homo sapiens; identical to SEQ ID NO: 7977

SEQ ID NO: 8046 - DNA, 201 bp, Homo sapiens; identical to SEQ ID NO: 7978

SEQ ID NO: 8047 - DNA, 201 bp, Homo sapiens; identical to SEQ ID NO: 7979

SEQ ID NO: 8048 - DNA, 201 bp, Homo sapiens; identical to SEQ ID NO: 7990

SEQ ID NO: 8049 - DNA, 201 bp, Homo sapiens; identical to SEQ ID NO: 7980

SEQ ID NO: 8050 - DNA, 201 bp, Homo sapiens; identical to SEQ ID NO: 7981

SEQ ID NO: 8051 - DNA, 201 bp, Homo sapiens; identical to SEQ ID NO: 7982

SEQ ID NO: 8052 - DNA, 201 bp, Homo sapiens; identical to SEQ ID NO: 7983

SEQ ID NO: 8053 - DNA, 201 bp, Homo sapiens; identical to SEQ ID NO: 7984

SEQ ID NO: 8054 - DNA, 201 bp, Homo sapiens; identical to SEQ ID NO: 7985

SEQ ID NO: 8055 - DNA, 201 bp, Homo sapiens; identical to SEQ ID NO: 7997

SEQ ID NO: 8056 - DNA, 201 bp, Homo sapiens
tgctcgaagaagagaattaggacctgctatccactgggagaggctatcagccagtcctgggacttggagacccagcatcctttgcattactttttccttcwggatgatctagagcagcatggagctgttggtagaatattagtttttaaccatacattgtcccaaaagtgtctgtgcattgtgcaaaaagtaaacttagga

SEQ ID NO: 8057 - DNA, 201 bp, Homo sapiens
atctcagtcaggataagctcacagatgtggccatcggggcccccctggaaggttttggggcagatgatggtgccagcttcggcagtgtgtatatctacaayggacactgggacggcctctccgccagcccctcgcagcggatcagagcctccacggtggccccaggactccagtacttcggcatgtccatggctggtggct

SEQ ID NO: 8058 - DNA, 103 bp, Homo sapiens
tagtttttaaccatacattgtcccaaaagtgtctgtgcattgtgcaaaaagtaaacttaggaaacatttggtattaaataaatttacacttttctttgcarta

SEQ ID NO: 8059 - DNA, 162 bp, Homo sapiens
tctgtccccgcctcctggcctcctggctgaggggaagctgagtgggccacggcccatgtgtygcactcgcctcggctcccacacagccgcctctgctccagcaaggatgtggctcttccacactctgctctgcatagccagcctggccctgctggccgcttt

SEQ ID NO: 8060 - DNA, 201 bp, Homo sapiens
ctaactccggggaagattcctacatgacaagcatggccttgaattaccccagaaacctgcagttgaagaggatgcaaaagcctccctctccaaacattcastgtgatgaccctcagccggttgcttctgtcctgatcatgaactgcaggattggtcaccccgtcctcaagaggtcatctgctcatgtttcagtcgtttggc

SEQ ID NO: 8061 - DNA, 111 bp, Homo sapiens
tagaatattagtttttaaccatacattgtcccaaaagtgtctgtgcattgtgcaaaaagtaaacttaggaaacatttggtattaaataaatttacactttwctttgcagta

SEQ ID NO: 8062 - DNA, 201 bp, Homo sapiens
cacaaagaattcctcttccatgtacatggggagaacctctttggagcagaataccagttgcaaatttgcgtcccaaccaaattacgaggtctccaggttgyagcagtgaagaagctgacgaggactcaggcctccacggtgtgcacctggagtcaggagcgcgcttgtgcgtacagttcggttcagcatgtggaagaatgg

SEQ ID NO: 8063 - DNA, 201 bp, Homo sapiens
gcggcggcagacgcggaggctgcgcagtacagctacctgggttacgctgtggccgtgctgcacaagacctgcagcctctcctacgtcgcgggggctccacrgtacaaacatcatggggccgtgtttgagctccagaaggagggcagagaggccagcttcctgccagtgctggagggagagcagatggggtcctattttggc

SEQ ID NO: 8064 - DNA, 201 bp, Homo sapiens
cctggaccgctacactgagccctttgccatcttccagctgccctatgagaaggcctgcaagaataagctgttttgtgtcgcagaattacagttggccaccrccgtctctcagcaggagttggtggtgggtctcacaaaggagctgaccctgaacattaacctaactaactccggggaagattcctacatgacaagcatggc

SEQ ID NO: 8065 - DNA, 201 bp, Homo sapiens
gtcatctgctcatgtttcagtcgtttggcagctagaggagaatgcctttccaaacaggacagcagacatcactgtgactgtcaccaattccaatgaaagayggtctttggccaacgagacccacacccttcaattcaggcatggcttcgttgcagttctgtccaaaccatccataatgtacgtgaacacaggccaggggct

SEQ ID NO: 8066 - DNA, 201 bp, Homo sapiens
ggccgtgctgcacaagacctgcagcctctcctacgtcgcgggggctccacggtacaaacatcatggggccgtgtttgagctccagaaggagggcagagagkccagcttcctgccagtgctggagggagagcagatggggtcctattttggctctgagctgtgccctgtggacattgacatggatggaagcacggacttctt

SEQ ID NO: 8067 - DNA, 201 bp, Homo sapiens
tgtagcagtgaagaagctgacgaggactcaggcctccacggtgtgcacctggagtcaggagcgcgcttgtgcgtacagttcggttcagcatgtggaagaakggcattcagtgagctgtgtcatcgcttcagataaagaaaatgtcaccgtggctgcagagatctcctgggatcactctgaggagttactaaaagatgtaac

SEQ ID NO: 8068 - DNA, 201 bp, Homo sapiens
tcacccccagcgcactgcccatcggcttcaacggcgtcgtgaatgtccgtttatgttttgaaatcagctctgtaaccacagcctctgagtcaggcctccgygaggcacttctcaacttcacgctggatgtggatgtggggaagcagaggagacggctgcagtgttcagacgtaagaagctgtctgggctgcctgagggagt

SEQ ID NO: 8069 - DNA, 201 bp, Homo sapiens
cagagatctcctgggatcactctgaggagttactaaaagatgtaactgaactgcagatccttggtgaaatatctttcaacaaatctctatatgagggactkaatgcagagaaccacagaactaagatcactgtcgtcttcctgaaagatgagaagtaccattctttgcctatcatcattaaaggcagcgttggtggacttc

SEQ ID NO: 8070 - DNA, 201 bp, Homo sapiens
gaaccagacagcggcggcggcggcagacgcggaggctgcgcagtacagctacctgggttacgctgtggccgtgctgcacaagacctgcagcctctcctacrtcgcgggggctccacggtacaaacatcatggggccgtgtttgagctccagaaggagggcagagaggccagcttcctgccagtgctggagggagagcagat

SEQ ID NO: 8071 - DNA, 201 bp, Homo sapiens
aatgctttgtgtgattgaatctgattggacattttcttcagagagctaaattacaattgtcatttataaaaccatcaaaaatattccatccatatactttsgggacttgtagggatgcctttctagtcctattctattgcagttatagaaaatctagtcttttgccccagttacttaaaaataaaatattaacactttccc

SEQ ID NO: 8072 - DNA, 177 bp, Homo sapiens
cctattggaatattttctttatataggcgttttttttttttctttttttttggagacagagtcttgctctgttgcccaggctggagtgcagtggcgcgacyggagctcactgcaacctccacttcccgggttcaagtgattgtcccacctcagcctcctgaatagctgggattacag

SEQ ID NO: 8073 - DNA, 201 bp, Homo sapiens
ggcagctggctccggttttggggtatctgggctccaggcagaagcacagcctccccgacctgccctacgactacggcgccctggaacctcacatcaacgckcagatcatgcagctgcaccacagcaagcaccacgcggcctacgtgaacaacctgaacgtcaccgaggagaagtaccaggaggcgttggccaagggagatg

SEQ ID NO: 8074 - DNA, 201 bp, Homo sapiens
tatttcatttgtttctaattgttactacagataatgctggggtgagcaactctgtgtacataggtttatctcctattggaatattttctttatataggcgttttttttttttctttttttttggagacagagtcttgctctgttgcccaggctggagtgcagtggcgcgaccggagctcactgcaacctccacttcccggg

SEQ ID NO: 8075 - DNA, 201 bp, Homo sapiens
cggcagcggcttcagcagatcggcggcatcagcggtagcaccagcactagcagcatgttgagccgggcagtgtgcggcaccagcaggcagctggctccggytttggggtatctgggctccaggcagaagcacagcctccccgacctgccctacgactacggcgccctggaacctcacatcaacgcgcagatcatgcagctg

SEQ ID NO: 8076 - DNA, 144 bp, Homo sapiens
ggcggtgcccttgcggcgcagctggggtcgcggccctgctcccsgcgctttcttaaggcccgcgggcggcgcaggagcggcactcgtggctgtggtggcttcggcagcggcttcagcagatcggcggcatcagcggtagcacca

SEQ ID NO: 8077 - DNA, 201 bp, Homo sapiens
atcgttatgctgagtatgttaagctctttatgactgtttttgtagtggtatagagtactgcagaatacagtaagctgctctattgtagcatttcttgatgytgcttagtcacttatttcataaacaacttaatgttctgaataatttcttactaaacattttgttattgggcaagtgattgaaaatagtaaatgctttgtg

SEQ ID NO: 8078 - DNA, 201 bp, Homo sapiens
caacgcgcagatcatgcagctgcaccacagcaagcaccacgcggcctacgtgaacaacctgaacgtcaccgaggagaagtaccaggaggcgttggccaagrgagatgttacagcccagatagctcttcagcctgcactgaagttcaatggtggtggtcatatcaatcatagcattttctggacaaacctcagccctaacgg

SEQ ID NO: 8079 - DNA, 103 bp, Homo sapiens
cccaggctggagtgcagtggcgcgaccggagctcactgcaacctccacttcccgggttcaagtgattgtcccacctcagcctcctgaatagctgggattayag

SEQ ID NO: 8080 - DNA, 201 bp, Homo sapiens
atttcataaacaacttaatgttctgaataatttcttactaaacattttgttattgggcaagtgattgaaaatagtaaatgctttgtgtgattgaatctgaytggacattttcttcagagagctaaattacaattgtcatttataaaaccatcaaaaatattccatccatatactttggggacttgtagggatgcctttcta

SEQ ID NO: 8081 - DNA, 201 bp, Homo sapiens
atagaaaatctagtcttttgccccagttacttaaaaataaaatattaacactttcccaagggaaacactcggctttctatagaaaattgcactttttgtcragtaatcctctgcagtgatacttctggtagatgtcacccagtggtttttgttaggtcaaatgttcctgtatagtttttgcaaatagagctgtatactgtt

SEQ ID NO: 8082 - DNA, 181 bp, Homo sapiens
atctcctattggaatattttctttatataggcgttttttttttttctttttttttggagacagagtcttgctctgttgcccaggctggagtgcagtggcgygaccggagctcactgcaacctccacttcccgggttcaagtgattgtcccacctcagcctcctgaatagctgggattacag

SEQ ID NO: 8083 - DNA, 201 bp, Homo sapiens
ctgcaccacagcaagcaccacgcggcctacgtgaacaacctgaacgtcaccgaggagaagtaccaggaggcgttggccaagggagatgttacagcccagayagctcttcagcctgcactgaagttcaatggtggtggtcatatcaatcatagcattttctggacaaacctcagccctaacggtggtggagaacccaaaggg

SEQ ID NO: 8084 - DNA, 201 bp, Homo sapiens
ccacagcaagcaccacgcggcctacgtgaacaacctgaacgtcaccgaggagaagtaccaggaggcgttggccaagggagatgttacagcccagatagctyttcagcctgcactgaagttcaatggtggtggtcatatcaatcatagcattttctggacaaacctcagccctaacggtggtggagaacccaaaggggagtt

SEQ ID NO: 8085 - DNA, 201 bp, Homo sapiens
tgtaaatcactacatgaagcttatatattggtttggcctgaaaggtgaagtggggtaggcagggggcgggcttacaggttatggtggattcaaagactccytgatttgtgattggttaaggaagcaaagctttgtctaaaaacttggggtccgcagaaaggaacattaaggtctggccaggcccctcaggaagaaactgag

SEQ ID NO: 8086 - DNA, 201 bp, Homo sapiens
catacatttgccatgttgtttcatcatctgcctaatttactgtttttgaatatttcatttgtttctaattgttactacagataatgctggggtgagcaacwctgtgtacataggtttatctcctattggaatattttctttatataggcgttttttttttttctttttttttggagacagagtcttgctctgttgcccagg

SEQ ID NO: 8087 - DNA, 201 bp, Homo sapiens; identical to SEQ ID NO: 8071

SEQ ID NO: 8088 - DNA, 201 bp, Homo sapiens; identical to SEQ ID NO: 8073

SEQ ID NO: 8089 - DNA, 201 bp, Homo sapiens; identical to SEQ ID NO: 8075

SEQ ID NO: 8090 - DNA, 201 bp, Homo sapiens; identical to SEQ ID NO: 8077

SEQ ID NO: 8091 - DNA, 144 bp, Homo sapiens; identical to SEQ ID NO: 8076

SEQ ID NO: 8092 - DNA, 201 bp, Homo sapiens; identical to SEQ ID NO: 8078

SEQ ID NO: 8093 - DNA, 201 bp, Homo sapiens; identical to SEQ ID NO: 8080

SEQ ID NO: 8094 - DNA, 201 bp, Homo sapiens
atagaaaatctagtcttttgccccagttacttaaaaataaaatattaacactttcccaagggaaacactcggctttctatagaaaattgcactttttgtcrataatcccagcactttgggaggccaaggcaggcagaacacttgaaggagttcaagaccagcgtggccaacgtggtgaaaccctgtctctactaaaaatac

SEQ ID NO: 8095 - DNA, 201 bp, Homo sapiens; identical to SEQ ID NO: 8083

SEQ ID NO: 8096 - DNA, 201 bp, Homo sapiens; identical to SEQ ID NO: 8084

SEQ ID NO: 8097 - DNA, 167 bp, Homo sapiens
tacacatattgccagcactggtgaattgtagggcctgaaaagaaagctctactgtgtcactcgttttttttgcaaattgaaattgttcttgttgtataatrtgctttggggaaatgtttggtctctcaggtaggtgtgccagccgtttgcaggagggctgagagcgc

SEQ ID NO: 8098 - DNA, 201 bp, Homo sapiens
ggcagctggctccggttttggggtatctgggctccaggcagaagcacagcctccccgacctgccctacgactacggcgccctggaacctcacatcaacgckcagatcatgcagctgcaccacagcaagcaccacgcggcctacgtgaacaacctgaacgtcaccgaggagaagtaccaggaggcgttggccaagggtaggt

SEQ ID NO: 8099 - DNA, 201 bp, Homo sapiens; identical to SEQ ID NO: 8075

SEQ ID NO: 8100 - DNA, 144 bp, Homo sapiens; identical to SEQ ID NO: 8076

SEQ ID NO: 8101 - DNA, 201 bp, Homo sapiens
caacgcgcagatcatgcagctgcaccacagcaagcaccacgcggcctacgtgaacaacctgaacgtcaccgaggagaagtaccaggaggcgttggccaagrgtaggttccaggctgagcggcgggaggcagtccccggcagaggcgaccccagggagccaggccccatacggacgggcctctccgtggaggagaactcgct

SEQ ID NO: 8102 - DNA, 166 bp, Homo sapiens
acacatattgccagcactggtgaattgtagggcctgaaaagaaagctctactgtgtcactcgttttttttgcaaattgaaattgttcttgttgtataataygctttggggaaatgtttggtctctcaggtaggtgtgccagccgtttgcaggagggctgagagcgc

SEQ ID NO: 8103 - DNA, 201 bp, Homo sapiens
ccacctgcagcctgactgcgccgcaagacccggatccggctggaatggcaacctacagctggagtcgagagtctggggcaatggggcaggaaaagtgttaytacattaccatctttgcctctgcgcaccccgagaagctcaccttgtggtctacggtcctgtccacctaccactttgggggcaatgcctcagcagctggga

SEQ ID NO: 8104 - DNA, 201 bp, Homo sapiens
gggtgagtgactcgcccgaggctacgtagcacacacaggagtcacatttggacccaaataacccagagctcctccaggctccagtgcacctgcctcctctytgccccgtgcctgttgccacccatcctgcgggggaaccctagatgctgccatgaaatggaagctgctgcaccctgctgggcctggcatccgtggggcagg

SEQ ID NO: 8105 - DNA, 201 bp, Homo sapiens
ggctgcagttctccgaccaggctggggtgtctgtgctgtacactgtcacactctgggtggaatcctgggccaggaaccagacagagaagtctcctgaggtvaccctgcagctctacaactcagttaaatatgagcctcctctgggagacatcaaggtgtccaagttggccgggcagctgcgtatggagtgggagaccccgg

SEQ ID NO: 8106 - DNA, 201 bp, Homo sapiens
cctgcgggggaaccctagatgctgccatgaaatggaagctgctgcaccctgctgggcctggcatccgtggggcaggagcagaccctgccatttacctgttytggcgtagaatggactgggaatgggggcaaggggggctcagatggatccctggaccctgggctgggcatccacccccaggagcactggatggggagtctg

SEQ ID NO: 8107 - DNA, 201 bp, Homo sapiens
tccttgctcagcttcaatgtgttccggagtggggacggggtggctgaacctcgcaggtggcagagaggctcccctggggctgtggggctctacgtggatcygatggagccgctggtgacctgggtggtccccctcctcttcctcttcctgctgtccaggcagggcgctgcctgcagaaccagtgagtgctgttttcaggac

SEQ ID NO: 8108 - DNA, 201 bp, Homo sapiens
caggttggggtttctaggagggcagctccagaggttgcagaacactccgctgcctctccagagccaggcacacagcaggcgctccataaatgttcgttggwcttttctccttgctcagcttcaatgtgttccggagtggggacggggtggctgaacctcgcaggtggcagagaggctcccctggggctgtggggctctacg

SEQ ID NO: 8109 - DNA, 201 bp, Homo sapiens
ccctgagctggccctggatacagagttgtccttggaggatggagacaggtgcaaggccaagatgtgatcgttgaggctcagagagggtgagtgactcgccygaggctacgtagcacacacaggagtcacatttggacccaaataacccagagctcctccaggctccagtgcacctgcctcctctctgccccgtgcctgttg

SEQ ID NO: 8110 - DNA, 201 bp, Homo sapiens
tctgaatatcagcgtcggaaccaacgggaccaccatgtattggccagcccgggctcagagcatgacgtattgcattgaatggcagcctgtgggccaggacsggggccttgccacctgcagcctgactgcgccgcaagacccggatccggctggaatggcaacctacagctggagtcgagagtctggggcaatggggcagga

SEQ ID NO: 8111 - DNA, 201 bp, Homo sapiens
tctcctcgaaccaatttggtcctggcctgaaccagacgtggcacattcctgccgacacccacacagaaccagtggctctgaatatcagcgtcggaaccaaygggaccaccatgtattggccagcccgggctcagagcatgacgtattgcattgaatggcagcctgtgggccaggacgggggccttgccacctgcagcctga

SEQ ID NO: 8112 - DNA, 201 bp, Homo sapiens
cacagagacccaagttaccctcagtggcctgcgggctggtgtagcctacacggtgcaggtgcgagcagacacagcgtggctgaggggtgtctggagccagycccagcgcttcagcatcgaagtgcaggtttctgattggctcatcttcttcgcctccctggggagcttcctgagcatccttctcgtgggcgtccttggcta

SEQ ID NO: 8113 - DNA, 201 bp, Homo sapiens
acattcctgccgacacccacacagaaccagtggctctgaatatcagcgtcggaaccaacgggaccaccatgtattggccagcccgggctcagagcatgacrtattgcattgaatggcagcctgtgggccaggacgggggccttgccacctgcagcctgactgcgccgcaagacccggatccggctggaatggcaacctaca

SEQ ID NO: 8114 - DNA, 201 bp, Homo sapiens
acaggtgtcagagcatcccgtgcagcccacagagacccaagttaccctcagtggcctgcgggctggtgtagcctacacggtgcaggtgcgagcagacacarcgtggctgaggggtgtctggagccagccccagcgcttcagcatcgaagtgcaggtttctgattggctcatcttcttcgcctccctggggagcttcctgag

SEQ ID NO: 8115 - DNA, 201 bp, Homo sapiens
cccatggaagttgggcgactgcggacctcaggatgatgatactgagtcctgcctctgccccctggagatgaatgtggcccaggaattccagctccgacgayggcagctggggagccaaggaagttcctggagcaagtggagcagccccgtgtgcgttccccctgaaaaccccccacagcctcaggtgagattctcggtgga

SEQ ID NO: 8116 - DNA, 201 bp, Homo sapiens
tggcacattcctgccgacacccacacagaaccagtggctctgaatatcagcgtcggaaccaacgggaccaccatgtattggccagcccgggctcagagcaygacgtattgcattgaatggcagcctgtgggccaggacgggggccttgccacctgcagcctgactgcgccgcaagacccggatccggctggaatggcaacc

SEQ ID NO: 8117 - DNA, 201 bp, Homo sapiens
tggaagttgggcgactgcggacctcaggatgatgatactgagtcctgcctctgccccctggagatgaatgtggcccaggaattccagctccgacgacggcrgctggggagccaaggaagttcctggagcaagtggagcagccccgtgtgcgttccccctgaaaaccccccacagcctcaggtgagattctcggtggagcag

SEQ ID NO: 8118 - DNA, 201 bp, Homo sapiens
acagagaagtctcctgaggtgaccctgcagctctacaactcagttaaatatgagcctcctctgggagacatcaaggtgtccaagttggccgggcagctgcrtatggagtgggagaccccggataaccaggttggtgctgaggtgcagttccggcaccggacacccagcagcccatggaagttgggcgactgcggacctcag

SEQ ID NO: 8119 - DNA, 201 bp, Homo sapiens
aggagcactggatggggagtctggactcaagggctccctgcagcattgcggggtcttgtagcttggaggatccaggcatatagggaagggggctgtaaacwttgtgggaaaaatgacggtcctcccatcccaccccccaccccaccctcacccccctataaaatgggggtggtgataatgaccttacacagctgttcaaaa

SEQ ID NO: 8120 - DNA, 201 bp, Homo sapiens
gagggtgagtgactcgcccgaggctacgtagcacacacaggagtcacatttggacccaaataacccagagctcctccaggctccagtgcacctgcctcctytctgccccgtgcctgttgccacccatcctgcgggggaaccctagatgctgccatgaaatggaagctgctgcaccctgctgggcctggcatccgtggggca

SEQ ID NO: 8121 - DNA, 201 bp, Homo sapiens
ttctggcgtagaatggactgggaatgggggcaaggggggctcagatggatccctggaccctgggctgggcatccacccccaggagcactggatggggagtytggactcaagggctccctgcagcattgcggggtcttgtagcttggaggatccaggcatatagggaagggggctgtaaactttgtgggaaaaatgacggtc

SEQ ID NO: 8122 - DNA, 201 bp, Homo sapiens; identical to SEQ ID NO: 8104

SEQ ID NO: 8123 - DNA, 201 bp, Homo sapiens; identical to SEQ ID NO: 8103

SEQ ID NO: 8124 - DNA, 201 bp, Homo sapiens; identical to SEQ ID NO: 8105

SEQ ID NO: 8125 - DNA, 201 bp, Homo sapiens; identical to SEQ ID NO: 8106

SEQ ID NO: 8126 - DNA, 201 bp, Homo sapiens; identical to SEQ ID NO: 8107

SEQ ID NO: 8127 - DNA, 153 bp, Homo sapiens
gccttagggatgggctgtgacactttactttttttcttttttcttttttttcwgtcttttctccttgctcagcttcaatgtgttccggagtggggacggggtggctgaacctcgcaggtggcagagaggctcccctggggctgtggggctcta

SEQ ID NO: 8128 - DNA, 201 bp, Homo sapiens; identical to SEQ ID NO: 8109

SEQ ID NO: 8129 - DNA, 201 bp, Homo sapiens; identical to SEQ ID NO: 8111

SEQ ID NO: 8130 - DNA, 201 bp, Homo sapiens; identical to SEQ ID NO: 8110

SEQ ID NO: 8131 - DNA, 201 bp, Homo sapiens; identical to SEQ ID NO: 8112

SEQ ID NO: 8132 - DNA, 201 bp, Homo sapiens; identical to SEQ ID NO: 8113

SEQ ID NO: 8133 - DNA, 201 bp, Homo sapiens; identical to SEQ ID NO: 8114

SEQ ID NO: 8134 - DNA, 201 bp, Homo sapiens; identical to SEQ ID NO: 8115

SEQ ID NO: 8135 - DNA, 201 bp, Homo sapiens; identical to SEQ ID NO: 8117

SEQ ID NO: 8136 - DNA, 201 bp, Homo sapiens; identical to SEQ ID NO: 8116

SEQ ID NO: 8137 - DNA, 201 bp, Homo sapiens; identical to SEQ ID NO: 8118

SEQ ID NO: 8138 - DNA, 201 bp, Homo sapiens; identical to SEQ ID NO: 8119

SEQ ID NO: 8139 - DNA, 201 bp, Homo sapiens; identical to SEQ ID NO: 8120

SEQ ID NO: 8140 - DNA, 201 bp, Homo sapiens; identical to SEQ ID NO: 8121

SEQ ID NO: 8141 - DNA, 201 bp, Homo sapiens
ctggccctggatacagagttgtccttggaggatggagacaggtgcaaggccaaggtcctggggcccagtgggccagacggtcaggggtgcaaccctgccckgggggtgggggggctagacatccatcgctcctgggatatcagggcctggaggcctgagggagaaacgaaaacatccactttgtcttacagacacgaagag

SEQ ID NO: 8142 - DNA, 201 bp, Homo sapiens; identical to SEQ ID NO: 8103

SEQ ID NO: 8143 - DNA, 201 bp, Homo sapiens; identical to SEQ ID NO: 8105

SEQ ID NO: 8144 - DNA, 201 bp, Homo sapiens; identical to SEQ ID NO: 8107

SEQ ID NO: 8145 - DNA, 201 bp, Homo sapiens; identical to SEQ ID NO: 8108

SEQ ID NO: 8146 - DNA, 201 bp, Homo sapiens; identical to SEQ ID NO: 8110

SEQ ID NO: 8147 - DNA, 201 bp, Homo sapiens; identical to SEQ ID NO: 8111

SEQ ID NO: 8148 - DNA, 201 bp, Homo sapiens; identical to SEQ ID NO: 8112

SEQ ID NO: 8149 - DNA, 201 bp, Homo sapiens; identical to SEQ ID NO: 8113

SEQ ID NO: 8150 - DNA, 201 bp, Homo sapiens; identical to SEQ ID NO: 8114

SEQ ID NO: 8151 - DNA, 201 bp, Homo sapiens; identical to SEQ ID NO: 8115

SEQ ID NO: 8152 - DNA, 201 bp, Homo sapiens; identical to SEQ ID NO: 8116

SEQ ID NO: 8153 - DNA, 201 bp, Homo sapiens; identical to SEQ ID NO: 8117

SEQ ID NO: 8154 - DNA, 201 bp, Homo sapiens; identical to SEQ ID NO: 8118

SEQ ID NO: 8155 - DNA, 201 bp, Homo sapiens; identical to SEQ ID NO: 8104

SEQ ID NO: 8156 - DNA, 201 bp, Homo sapiens; identical to SEQ ID NO: 8103

SEQ ID NO: 8157 - DNA, 201 bp, Homo sapiens; identical to SEQ ID NO: 8105

SEQ ID NO: 8158 - DNA, 201 bp, Homo sapiens; identical to SEQ ID NO: 8106

SEQ ID NO: 8159 - DNA, 201 bp, Homo sapiens; identical to SEQ ID NO: 8107

SEQ ID NO: 8160 - DNA, 153 bp, Homo sapiens; identical to SEQ ID NO: 8127

SEQ ID NO: 8161 - DNA, 201 bp, Homo sapiens
tacctgagggtgcccctgagctggccctggatacagagttgtccttggaggatggagacagatgtgatcgttgaggctcagagagggtgagtgactcgccygaggctacgtagcacacacaggagtcacatttggacccaaataacccagagctcctccaggctccagtgcacctgcctcctctctgccccgtgcctgttg

SEQ ID NO: 8162 - DNA, 201 bp, Homo sapiens; identical to SEQ ID NO: 8111

SEQ ID NO: 8163 - DNA, 201 bp, Homo sapiens; identical to SEQ ID NO: 8110

SEQ ID NO: 8164 - DNA, 201 bp, Homo sapiens; identical to SEQ ID NO: 8113

SEQ ID NO: 8165 - DNA, 201 bp, Homo sapiens; identical to SEQ ID NO: 8115

SEQ ID NO: 8166 - DNA, 201 bp, Homo sapiens; identical to SEQ ID NO: 8117

SEQ ID NO: 8167 - DNA, 201 bp, Homo sapiens; identical to SEQ ID NO: 8116

SEQ ID NO: 8168 - DNA, 201 bp, Homo sapiens; identical to SEQ ID NO: 8118

SEQ ID NO: 8169 - DNA, 201 bp, Homo sapiens; identical to SEQ ID NO: 8119

SEQ ID NO: 8170 - DNA, 201 bp, Homo sapiens; identical to SEQ ID NO: 8120

SEQ ID NO: 8171 - DNA, 201 bp, Homo sapiens; identical to SEQ ID NO: 8121

SEQ ID NO: 8172 - DNA, 201 bp, Homo sapiens
ctgccctgtccctcatcatcacggcagatgatggcagcggcggccccctcatgagccccctttccccgcgctctctgtcctcgaacccgtcgtcccgtgaytcttcgccgagccgagacccgtcccccgtgtgtggcagcctgcggccccccatcgttatccacagctctggcaagaagtacggcttcagcctgcgggcga

SEQ ID NO: 8173 - DNA, 201 bp, Homo sapiens
acatcaagctcacggacttcggcctgtccaagatcggcctcatgagcatggccaccaacctctatgagggccacatcgagaaggacgcccgagagttcatygacaagcaggtgtgtgggacgccggagtacatagcccccgaggtgatcttccgccagggctatgggaagccagtggactggtgggccatgggcgtcgtcc

SEQ ID NO: 8174 - DNA, 201 bp, Homo sapiens
gccctcgagcctttctgccgacacagctgctctcagccacgcccgcctacggagcaatagcatcggcgcccgacactccacaccaaggcctctggatgccrgccggggccgccgccttgggggcccaagagacccagcccctgagaagtccagagcctcctccagcggtggcagtggtggcggcagtgggggccgcgtgcc

SEQ ID NO: 8175 - DNA, 201 bp, Homo sapiens
gtgttctggtgtcaatcagggggctggatggggcaagaatgggggacaagggtggctttgtaaatagcagcaaatccctgcaactaatttattactttttyttttttttttttttttttgagacagagtctcactctgttgcccgggctggagtgcagcggcgtgatctcagctcactgcaacctccgcctcccaagttca

SEQ ID NO: 8176 - DNA, 201 bp, Homo sapiens
aggaaggcggccggtcaccccgcctccgaccccgctctcgcagtctcagcccgggccgtgcaacggggaccttcgacaatgagattgtcatgatgaatcaygtgtaccgggagaggttccccaaggccacagcacagatggagggccgtctgcaggagttcctgacggcctacgcgcccggcgcccggctggcgctggctg

SEQ ID NO: 8177 - DNA, 201 bp, Homo sapiens
tggggctggtgcacatggacgtcgtggagctgctgctgaagagcggcaacaagatatccctgcggaccacagccctggagaacacctccatcaaggtgggycccgcccggaagaatgtggccaagggccgcatggcacgcaggagcaagaggagccgtcggcgggagacccaggatcggcggaagtcacttttcaagaaga

SEQ ID NO: 8178 - DNA, 201 bp, Homo sapiens
gtgctgacatccggctgaggtcctggacatcctctggatcctcctgtcagtcatcttcgtcccagcccgagcggggtcccagcccatctctcctgaatacyatcagcctggacacaatgcccaagtttgccttctcatcagaggatgagggggtaggcccaggccctgcaggccccaagaggcccgtcttcattctagggg

SEQ ID NO: 8179 - DNA, 201 bp, Homo sapiens
cgactccagccccagctcatcccccatgatgctgtgtgacccactgggcactctggtgagggagctttccagacatcaacagcccactctgcttccctttytgagtcccctgtccagcactgcctagtgttggagggtagaccaaggctgtgcatgattcaccccctccttccatcctggagctggcagtgaataaaagcc

SEQ ID NO: 8180 - DNA, 201 bp, Homo sapiens
ctggtggcacccacgaagtgaagcagcacccctttttcctggccctggactgggcagggcttctccgacacaaagccgagttcgtgccccagctcgaagcygaggatgataccagctactttgacacacgttcggaacgttaccgccatctgggctccgaggacgacgagaccaatgatgaagaatcgtccacagagatcc

SEQ ID NO: 8181 - DNA, 201 bp, Homo sapiens
gccattgtcggtcccaacggcaggcagcagccccttggatagtcctcggaatttctcggctgcctctgccctaaatttcccctttgcccggagggcagacsgcagaagatggtccctcgcgtctctcccatcttccggctatggaaccaacacacccagctccaccctctcgtcaagctcatcctcccgggaacgtctcca

SEQ ID NO: 8182 - DNA, 201 bp, Homo sapiens
ccccgaggcggagccagcccggcccccagcggcccagcccccgcgtctagtctgccgcaccagccaggcgtctgtccctgcgtccgtgtgtccgtccgtcrgtccgctcgcgccacgatcagggcttccgggggccaacaagggggcgtcggtaccccgccgcacagaggcggcctctgcctcggcatgaagtcccgcagg

SEQ ID NO: 8183 - DNA, 201 bp, Homo sapiens
gttctactgttcaagcttctgaaataaacaggacttgatcacaagtaggtgtgtattgatgctatcatgatgtgctgggggttgggggatagagttatttkgcccaggcttcctttacttcttggtcctgtataatctctttggtctctataacccccgattccagccaacaccttgaaccctcaaactcataccttctgc

SEQ ID NO: 8184 - DNA, 201 bp, Homo sapiens
agcactcgaccgtggtgggtaagatctggctgacggtgctcttcatcttccgcatcctcatcctgggcctggccggcgagtcagtgtggggtgacgagcartcagatttcgagtgtaacacggcccagccaggctgcaccaacgtctgctatgaccaggccttccccatctcccacatccgctactgggtgctgcagttcc

SEQ ID NO: 8185 - DNA, 201 bp, Homo sapiens
gcggtagaacgggcgtggcagacctccctgcaggcttgttgctgggcgaacgagaaggatgccatgctgacacactgacgtgctctgtctccttgcagacrgaggcccgggagccatgggtgactggggcttcctggagaagttgctggaccaggtccaggagcactcgaccgtggtgggtaagatctggctgacggtgct

SEQ ID NO: 8186 - DNA, 201 bp, Homo sapiens
ggctgcggcagaaggagggggagctgcgggcactgccggccaaggacccacaggtggagcgggcgctggcggccgtagagcgtcagatggccaagatctcrgtggcagaagatggtcgcctgcgcatccgcggagcactgatgggcacctatgtcgccagtgtgctctgcaagagtgtgctagaggcaggcttcctctatg

SEQ ID NO: 8187 - DNA, 201 bp, Homo sapiens
catttacctgtctcggcgagaagagcggctgcggcagaaggagggggagctgcgggcactgccggccaaggacccacaggtggagcgggcgctggcggccrtagagcgtcagatggccaagatctcggtggcagaagatggtcgcctgcgcatccgcggagcactgatgggcacctatgtcgccagtgtgctctgcaagag

SEQ ID NO: 8188 - DNA, 201 bp, Homo sapiens
cggcagaaggagggggagctgcgggcactgccggccaaggacccacaggtggagcgggcgctggcggccgtagagcgtcagatggccaagatctcggtggyagaagatggtcgcctgcgcatccgcggagcactgatgggcacctatgtcgccagtgtgctctgcaagagtgtgctagaggcaggcttcctctatggccag

SEQ ID NO: 8189 - DNA, 201 bp, Homo sapiens
tggaccaggtccaggagcactcgaccgtggtgggtaagatctggctgacggtgctcttcatcttccgcatcctcatcctgggcctggccggcgagtcagtrtggggtgacgagcaatcagatttcgagtgtaacacggcccagccaggctgcaccaacgtctgctatgaccaggccttccccatctcccacatccgctact

SEQ ID NO: 8190 - DNA, 201 bp, Homo sapiens
ccccaacctcaccctatggaacagtcacctgtgcgcaggttgtcctcaaaccctctcctcacaggaaaaggcggattgaggctgctgggtcagccttgatsgcacagacagagcttgtgccggatttggccctgtcaaggggactggtgccttgttttcatcactccttcctagttctactgttcaagcttctgaaataaa

SEQ ID NO: 8191 - DNA, 201 bp, Homo sapiens
ggggatgagggcacggcaaggccaagacgcacccccgacccagggcacctcctcagacccttacacggaccaggtcttcttctacctccccgtgggccagrggccctcatccccaccatgccccacctacaatgggctctcatccagtgagcagaactgggccaacctgaccacagaggagaggctggcgtcttccaggcc

SEQ ID NO: 8192 - DNA, 201 bp, Homo sapiens
atccagtgagcagaactgggccaacctgaccacagaggagaggctggcgtcttccaggccccctctcttcctggacccaccccctcagaatggccaaaaayccccaagtcgtcccagcagctctgcttctaagaagcagtatgtatagaggcctgtggcttatgtcacccaacagaggggtcctgagaagtctggctgcct

SEQ ID NO: 8193 - DNA, 201 bp, Homo sapiens
tggccaagggtactgggggccctctggccttttgcagctgatccagaggaacccagagccaacttaccccaacctcaccctatggaacagtcacctgtgcrcaggttgtcctcaaaccctctcctcacaggaaaaggcggattgaggctgctgggtcagccttgatcgcacagacagagcttgtgccggatttggccctgt

SEQ ID NO: 8194 - DNA, 201 bp, Homo sapiens
ctgtctcggcgagaagagcggctgcggcagaaggagggggagctgcgggcactgccggccaaggacccacaggtggagcgggcgctggcggccgtagagcktcagatggccaagatctcggtggcagaagatggtcgcctgcgcatccgcggagcactgatgggcacctatgtcgccagtgtgctctgcaagagtgtgcta

SEQ ID NO: 8195 - DNA, 201 bp, Homo sapiens
tatgtcacccaacagaggggtcctgagaagtctggctgcctgggatgccccctgccccctcctggaaggctctgcagagatgactgggctggggaagcagrtgcttgctggccatggagcctcattgcaagttgttcttgaacacctgaggccttcctggtgcccaccaggcactacggcttcctctccagaatgtggctt

SEQ ID NO: 8196 - DNA, 201 bp, Homo sapiens; identical to SEQ ID NO: 8183

SEQ ID NO: 8197 - DNA, 201 bp, Homo sapiens; identical to SEQ ID NO: 8184

SEQ ID NO: 8198 - DNA, 173 bp, Homo sapiens
agcagggctcccgcgggcgtcactccggccatcgtccccacctccacctgggccgcccggcaggcaggcgacrgaggcccgggagccatgggtgactggggcttcctggagaagttgctggaccaggtccaggagcactcgaccgtggtgggtaagatctggctgacggtgct

SEQ ID NO: 8199 - DNA, 201 bp, Homo sapiens; identical to SEQ ID NO: 8186

SEQ ID NO: 8200 - DNA, 201 bp, Homo sapiens; identical to SEQ ID NO: 8187

SEQ ID NO: 8201 - DNA, 201 bp, Homo sapiens; identical to SEQ ID NO: 8188

SEQ ID NO: 8202 - DNA, 201 bp, Homo sapiens; identical to SEQ ID NO: 8189

SEQ ID NO: 8203 - DNA, 201 bp, Homo sapiens; identical to SEQ ID NO: 8190

SEQ ID NO: 8204 - DNA, 201 bp, Homo sapiens; identical to SEQ ID NO: 8191

SEQ ID NO: 8205 - DNA, 201 bp, Homo sapiens; identical to SEQ ID NO: 8192

SEQ ID NO: 8206 - DNA, 201 bp, Homo sapiens; identical to SEQ ID NO: 8193

SEQ ID NO: 8207 - DNA, 201 bp, Homo sapiens; identical to SEQ ID NO: 8194

SEQ ID NO: 8208 - DNA, 201 bp, Homo sapiens; identical to SEQ ID NO: 8195

SEQ ID NO: 8209 - DNA, 201 bp, Homo sapiens
atatttctggtgaccatggtcctcctgggctgtgagctctggtctgcagtcatcatgtgtgccaccatcgccatggtcttggtcaacatgtttggagttaygtggctctggggcatcagtctgaacgctgtatccttggtcaacctggtgatgagctgtggcatctccgtggagttctgcagccacataaccagagcgttc

SEQ ID NO: 8210 - DNA, 201 bp, Homo sapiens
ttctgcagttaacatcctccttggccatggcaccagggtcggagccacgtacttcatgacctaccacaccgtgctgcagacctctgctgactttattgacrctctgaagaaagcccgacttatagccagtaatgtcaccgaaaccatgggcattaacggcagtgcctaccgagtatttccttacagtgtgttttatgtctt

SEQ ID NO: 8211 - DNA, 201 bp, Homo sapiens
cgccatggtcttggtcaacatgtttggagttatgtggctctggggcatcagtctgaacgctgtatccttggtcaacctggtgatgagctgtggcatctccrtggagttctgcagccacataaccagagcgttcacggtgagcatgaaaggcagccgcgtggagcgcgcggaagaggcacttgcccacatgggcagctccgt

SEQ ID NO: 8212 - DNA, 201 bp, Homo sapiens
ggcctgggaaaaagagtttattaattttgtgaaaaactacaagaatcccaatctgaccatttccttcactgctgaacgaagtattgaagatgaactaaatygtgaaagtgacagtgatgtcttcaccgttgtaattagctatgccatcatgtttctatatatttccctagccttggggcacatcaaaagctgtcgcaggct

SEQ ID NO: 8213 - DNA, 201 bp, Homo sapiens
accagagcgttcacggtgagcatgaaaggcagccgcgtggagcgcgcggaagaggcacttgcccacatgggcagctccgtgttcagtggaatcacacttavaaaatttggagggattgtggtgttggcttttgccaaatctcaaattttccagatattctacttcaggatgtatttggccatggtcttactgggagccact

SEQ ID NO: 8214 - DNA, 201 bp, Homo sapiens
tgggctgtgagctctggtctgcagtcatcatgtgtgccaccatcgccatggtcttggtcaacatgtttggagttatgtggctctggggcatcagtctgaaygctgtatccttggtcaacctggtgatgagctgtggcatctccgtggagttctgcagccacataaccagagcgttcacggtgagcatgaaaggcagccgcg

SEQ ID NO: 8215 - DNA, 201 bp, Homo sapiens
cagtgtgttttatgtcttctacgaacagtacctgaccatcattgacgacactatcttcaacctcggtgtgtccctgggcgcgatatttctggtgaccatgktcctcctgggctgtgagctctggtctgcagtcatcatgtgtgccaccatcgccatggtcttggtcaacatgtttggagttatgtggctctggggcatcag

SEQ ID NO: 8216 - DNA, 201 bp, Homo sapiens
acacttacaaaatttggagggattgtggtgttggcttttgccaaatctcaaattttccagatattctacttcaggatgtatttggccatggtcttactggragccactcacggattaatatttctccctgtcttactcagttacatagggccatcagtaaataaagccaaaagttgtgccactgaagagcgatacaaagga

SEQ ID NO: 8217 - DNA, 201 bp, Homo sapiens
ttgaagatgaactaaatcgtgaaagtgacagtgatgtcttcaccgttgtaattagctatgccatcatgtttctatatatttccctagccttggggcacatsaaaagctgtcgcaggcttctggtggattcgaaggtctcactaggcatcgcgggcatcttgatcgtgctgagctcggtggcttgctccttgggtgtcttca

SEQ ID NO: 8218 - DNA, 201 bp, Homo sapiens
agagtgtggaattgcatatggggacaagaggtacaattgcgaatattctggcccaccaaaaccattgccaaaggatggatatgacttagtgcaggaactcygtccaggattcttctttggcaatgtcagtctctgttgtgatgttcggcagcttcagacactaaaagacaacctgcagctgcctctacagtttctgtccag

SEQ ID NO: 8219 - DNA, 201 bp, Homo sapiens
tcttccaaggggcagaacatggtgtgcggcggcatgggctgcaacaatgattccctggtgcagcagatatttaacgcggcgcagctggacaactatacccraataggcttcgccccctcgtcctggatcgacgattatttcgactgggtgaagccacagtcgtcttgctgtcgagtggacaatatcactgaccagttctgc

SEQ ID NO: 8220 - DNA, 201 bp, Homo sapiens
gaagggcacgactacacttcttccaaggggcagaacatggtgtgcggcggcatgggctgcaacaatgattccctggtgcagcagatatttaacgcggcgcmgctggacaactatacccgaataggcttcgccccctcgtcctggatcgacgattatttcgactgggtgaagccacagtcgtcttgctgtcgagtggacaat

SEQ ID NO: 8221 - DNA, 201 bp, Homo sapiens
agtagatattggattggatcagtctctttcgatgccagatgactcctacatggtggattatttcaaatccatcagtcagtacctgcatgcgggtccgcctrtgtactttgtcctggaggaagggcacgactacacttcttccaaggggcagaacatggtgtgcggcggcatgggctgcaacaatgattccctggtgcagca

SEQ ID NO: 8222 - DNA, 201 bp, Homo sapiens
caaagtagatattggattggatcagtctctttcgatgccagatgactcctacatggtggattatttcaaatccatcagtcagtacctgcatgcgggtccgyctgtgtactttgtcctggaggaagggcacgactacacttcttccaaggggcagaacatggtgtgcggcggcatgggctgcaacaatgattccctggtgca

SEQ ID NO: 8223 - DNA, 201 bp, Homo sapiens
actgcaccaggttcttgacttacaaatagccatcgaaaacattactgcctcttatgacaatgagactgtgacacttcaagacatctgcttggcccctcttycaccgtataacacgaactgcaccattttgagtgtgttaaattacttccagaacagccattccgtgctggaccacaagaaaggggacgacttctttgtgta

SEQ ID NO: 8224 - DNA, 201 bp, Homo sapiens
ttcctttcggataaccctaaccccaagtgtggcaaagggggacatgctgcctatagttctgcagttaacatcctccttggccatggcaccagggtcggagycacgtacttcatgacctaccacaccgtgctgcagacctctgctgactttattgacgctctgaagaaagcccgacttatagccagtaatgtcaccgaaacc

SEQ ID NO: 8225 - DNA, 201 bp, Homo sapiens
taccatcactcctgtgttttcagattttccagtccatgggatggagcccatgaacaatgccaccaaaggctgtgacgagtctgtggatgaggtcacagcaycatgtagctgccaagactgctctattgtctgtggccccaagccccagcccccacctcctcctgctccctggacgatccttggcttggacgccatgtatgt

SEQ ID NO: 8226 - DNA, 201 bp, Homo sapiens
gaagaaagcccgacttatagccagtaatgtcaccgaaaccatgggcattaacggcagtgcctaccgagtatttccttacagtgtgttttatgtcttctacraacagtacctgaccatcattgacgacactatcttcaacctcggtgtgtccctgggcgcgatatttctggtgaccatggtcctcctgggctgtgagctctg

SEQ ID NO: 8227 - DNA, 201 bp, Homo sapiens
ctgctcctgctcctccgctcctcctgcgcggggtgctgaaacagcccggggaagtagagccgcctccggggagcccaaccagccgaacgccgccggcgtcmgcagccttgcgcggccacagcatgaccgctcgcggcctggcccttggcctcctcctgctgctactgtgtccagcgcaggtgttttcacagtcctgtgttt

SEQ ID NO: 8228 - DNA, 201 bp, Homo sapiens
acagtcgtcttgctgtcgagtggacaatatcactgaccagttctgcaatgcttcagtggttgaccctgcctgcgttcgctgcaggcctctgactccggaargcaaacagaggcctcaggggggagacttcatgagattcctgcccatgttcctttcggataaccctaaccccaagtgtggcaaagggggacatgctgccta

SEQ ID NO: 8229 - DNA, 201 bp, Homo sapiens
gttacaatactacgtcggacagagttttgccaatgcaatgtacaatgcctgccgggatgtggaggccccctcaagtaatgacaaggccctgggactcctgkgtgggaaggacgctgacgcctgtaatgccaccaactggattgaatacatgttcaataaggacaatggacaggcaccttttaccatcactcctgtgttttc

SEQ ID NO: 8230 - DNA, 201 bp, Homo sapiens
tgattccctggtgcagcagatatttaacgcggcgcagctggacaactatacccgaataggcttcgccccctcgtcctggatcgacgattatttcgactggrtgaagccacagtcgtcttgctgtcgagtggacaatatcactgaccagttctgcaatgcttcagtggttgaccctgcctgcgttcgctgcaggcctctgac

SEQ ID NO: 8231 - DNA, 201 bp, Homo sapiens
ctactgaacctgttttgtgagctgacatgtagccctcgacagagtcagtttttgaatgttacagctactgaagattatgttgatcctgttacaaaccagaygaaaacaaatgtgaaagagttacaatactacgtcggacagagttttgccaatgcaatgtacaatgcctgccgggatgtggaggccccctcaagtaatgac

SEQ ID NO: 8232 - DNA, 201 bp, Homo sapiens
gagactgtagcatttttcttaggagcattgtccgtgatgccagccgtgcacaccttctctctctttgcgggattggcagtcttcattgactttcttctgcmgattacctgtttcgtgagtctcttggggttagacattaaacgtcaagagaaaaatcggctagacatcttttgctgtgtcagaggtgctgaagatggaaca

SEQ ID NO: 8233 - DNA, 201 bp, Homo sapiens
ggcgcgatatttctggtgaccatggtcctcctgggctgtgagctctggtctgcagtcatcatgtgtgccaccatcgccatggtcttggtcaacatgtttgkagttatgtggctctggggcatcagtctgaacgctgtatccttggtcaacctggtgatgagctgtggcatctccgtggagttctgcagccacataaccaga

SEQ ID NO: 8234 - DNA, 201 bp, Homo sapiens
gatgtccatcctgtttttataacctactgaacctgttttgtgagctgacatgtagccctcgacagagtcagtttttgaatgttacagctactgaagattaygttgatcctgttacaaaccagacgaaaacaaatgtgaaagagttacaatactacgtcggacagagttttgccaatgcaatgtacaatgcctgccgggatg

SEQ ID NO: 8235 - DNA, 201 bp, Homo sapiens
catgtttctatatatttccctagccttggggcacatcaaaagctgtcgcaggcttctggtggattcgaaggtctcactaggcatcgcgggcatcttgatcrtgctgagctcggtggcttgctccttgggtgtcttcagctacattgggttgcccttgaccctcattgtgattgaagtcatcccgttcctggtgctggctgt

SEQ ID NO: 8236 - DNA, 201 bp, Homo sapiens
cctggtgtttgtccgggtcacaaccaatccagttgacctctggtcagcccccagcagccaggctcgcctggaaaaagagtactttgaccagcactttgggmctttcttccggacggagcagctcatcatccgggcccctctcactgacaaacacatttaccagccatacccttcgggagctgatgtaccctttggacctcc

SEQ ID NO: 8237 - DNA, 201 bp, Homo sapiens
tagccttggggcacatcaaaagctgtcgcaggcttctggtggattcgaaggtctcactaggcatcgcgggcatcttgatcgtgctgagctcggtggcttgstccttgggtgtcttcagctacattgggttgcccttgaccctcattgtgattgaagtcatcccgttcctggtgctggctgttggagtggacaacatcttca

SEQ ID NO: 8238 - DNA, 201 bp, Homo sapiens
cttctcgctggtcttcattactgcgtgttcgtcaggcctggtgtttgtccgggtcacaaccaatccagttgacctctggtcagcccccagcagccaggctygcctggaaaaagagtactttgaccagcactttgggcctttcttccggacggagcagctcatcatccgggcccctctcactgacaaacacatttaccagcc

SEQ ID NO: 8239 - DNA, 201 bp, Homo sapiens
atcgcgggcatcttgatcgtgctgagctcggtggcttgctccttgggtgtcttcagctacattgggttgcccttgaccctcattgtgattgaagtcatccygttcctggtgctggctgttggagtggacaacatcttcattctggtgcaggcctaccagagagatgaacgtcttcaaggggaaaccctggatcagcagctg

SEQ ID NO: 8240 - DNA, 201 bp, Homo sapiens
aatctgaccatttccttcactgctgaacgaagtattgaagatgaactaaatcgtgaaagtgacagtgatgtcttcaccgttgtaattagctatgccatcakgtttctatatatttccctagccttggggcacatcaaaagctgtcgcaggcttctggtggattcgaaggtctcactaggcatcgcgggcatcttgatcgtg

SEQ ID NO: 8241 - DNA, 201 bp, Homo sapiens
ggattcgaaggtctcactaggcatcgcgggcatcttgatcgtgctgagctcggtggcttgctccttgggtgtcttcagctacattgggttgcccttgaccytcattgtgattgaagtcatcccgttcctggtgctggctgttggagtggacaacatcttcattctggtgcaggcctaccagagagatgaacgtcttcaagg

SEQ ID NO: 8242 - DNA, 201 bp, Homo sapiens
gcttcagacactaaaagacaacctgcagctgcctctacagtttctgtccagatgtccatcctgtttttataacctactgaacctgttttgtgagctgacaygtagccctcgacagagtcagtttttgaatgttacagctactgaagattatgttgatcctgttacaaaccagacgaaaacaaatgtgaaagagttacaata

SEQ ID NO: 8243 - DNA, 201 bp, Homo sapiens
tttcttctcgctggtcttcattactgcgtgttcgtcaggcctggtgtttgtccgggtcacaaccaatccagttgacctctggtcagcccccagcagccagsctcgcctggaaaaagagtactttgaccagcactttgggcctttcttccggacggagcagctcatcatccgggcccctctcactgacaaacacatttacca

SEQ ID NO: 8244 - DNA, 201 bp, Homo sapiens
cagctggacaactatacccgaataggcttcgccccctcgtcctggatcgacgattatttcgactgggtgaagccacagtcgtcttgctgtcgagtggacartatcactgaccagttctgcaatgcttcagtggttgaccctgcctgcgttcgctgcaggcctctgactccggaaggcaaacagaggcctcaggggggagac

SEQ ID NO: 8245 - DNA, 201 bp, Homo sapiens
tgcaggcctctgactccggaaggcaaacagaggcctcaggggggagacttcatgagattcctgcccatgttcctttcggataaccctaaccccaagtgtgrcaaagggggacatgctgcctatagttctgcagttaacatcctccttggccatggcaccagggtcggagccacgtacttcatgacctaccacaccgtgctg

SEQ ID NO: 8246 - DNA, 201 bp, Homo sapiens
gaggaagggcacgactacacttcttccaaggggcagaacatggtgtgcggcggcatgggctgcaacaatgattccctggtgcagcagatatttaacgcggygcagctggacaactatacccgaataggcttcgccccctcgtcctggatcgacgattatttcgactgggtgaagccacagtcgtcttgctgtcgagtggac

SEQ ID NO: 8247 - DNA, 201 bp, Homo sapiens
tgctccttgggtgtcttcagctacattgggttgcccttgaccctcattgtgattgaagtcatcccgttcctggtgctggctgttggagtggacaacatctycattctggtgcaggcctaccagagagatgaacgtcttcaaggggaaaccctggatcagcagctgggcagggtcctaggagaagtggctcccagtatgttc

SEQ ID NO: 8248 - DNA, 201 bp, Homo sapiens
caaatccatcagtcagtacctgcatgcgggtccgcctgtgtactttgtcctggaggaagggcacgactacacttcttccaaggggcagaacatggtgtgcrgcggcatgggctgcaacaatgattccctggtgcagcagatatttaacgcggcgcagctggacaactatacccgaataggcttcgccccctcgtcctggat

SEQ ID NO: 8249 - DNA, 201 bp, Homo sapiens
gtccatgggatggagcccatgaacaatgccaccaaaggctgtgacgagtctgtggatgaggtcacagcaccatgtagctgccaagactgctctattgtctrtggccccaagccccagcccccacctcctcctgctccctggacgatccttggcttggacgccatgtatgtcatcatgtggatcacctacatggcgtttttg

SEQ ID NO: 8250 - DNA, 201 bp, Homo sapiens
gatgccagatgactcctacatggtggattatttcaaatccatcagtcagtacctgcatgcgggtccgcctgtgtactttgtcctggaggaagggcacgackacacttcttccaaggggcagaacatggtgtgcggcggcatgggctgcaacaatgattccctggtgcagcagatatttaacgcggcgcagctggacaacta

SEQ ID NO: 8251 - DNA, 201 bp, Homo sapiens
agtgatgtcttcaccgttgtaattagctatgccatcatgtttctatatatttccctagccttggggcacatcaaaagctgtcgcaggcttctggtggattsgaaggtctcactaggcatcgcgggcatcttgatcgtgctgagctcggtggcttgctccttgggtgtcttcagctacattgggttgcccttgaccctcatt

SEQ ID NO: 8252 - DNA, 201 bp, Homo sapiens
gatattggattggatcagtctctttcgatgccagatgactcctacatggtggattatttcaaatccatcagtcagtacctgcatgcgggtccgcctgtgtrctttgtcctggaggaagggcacgactacacttcttccaaggggcagaacatggtgtgcggcggcatgggctgcaacaatgattccctggtgcagcagata

SEQ ID NO: 8253 - DNA, 201 bp, Homo sapiens
aatgatacagagaagctccagagggcccaggcctgggaaaaagagtttattaattttgtgaaaaactacaagaatcccaatctgaccatttccttcactgytgaacgaagtattgaagatgaactaaatcgtgaaagtgacagtgatgtcttcaccgttgtaattagctatgccatcatgtttctatatatttccctagcc

SEQ ID NO: 8254 - DNA, 201 bp, Homo sapiens
caccaggttcttgacttacaaatagccatcgaaaacattactgcctcttatgacaatgagactgtgacacttcaagacatctgcttggcccctctttcacygtataacacgaactgcaccattttgagtgtgttaaattacttccagaacagccattccgtgctggaccacaagaaaggggacgacttctttgtgtatgcc

SEQ ID NO: 8255 - DNA, 201 bp, Homo sapiens
gtccgggtcacaaccaatccagttgacctctggtcagcccccagcagccaggctcgcctggaaaaagagtactttgaccagcactttgggcctttcttccrgacggagcagctcatcatccgggcccctctcactgacaaacacatttaccagccatacccttcgggagctgatgtaccctttggacctccgcttgacata

SEQ ID NO: 8256 - DNA, 201 bp, Homo sapiens
cgtccgaaaccctggctgtgtcattttcttctcgctggtcttcattactgcgtgttcgtcaggcctggtgtttgtccgggtcacaaccaatccagttgacytctggtcagcccccagcagccaggctcgcctggaaaaagagtactttgaccagcactttgggcctttcttccggacggagcagctcatcatccgggcccc

SEQ ID NO: 8257 - DNA, 201 bp, Homo sapiens
ttctgcgtccgaaaccctggctgtgtcattttcttctcgctggtcttcattactgcgtgttcgtcaggcctggtgtttgtccgggtcacaaccaatccagytgacctctggtcagcccccagcagccaggctcgcctggaaaaagagtactttgaccagcactttgggcctttcttccggacggagcagctcatcatccgg

SEQ ID NO: 8258 - DNA, 201 bp, Homo sapiens
actgaccagttctgcaatgcttcagtggttgaccctgcctgcgttcgctgcaggcctctgactccggaaggcaaacagaggcctcaggggggagacttcakgagattcctgcccatgttcctttcggataaccctaaccccaagtgtggcaaagggggacatgctgcctatagttctgcagttaacatcctccttggccat

SEQ ID NO: 8259 - DNA, 201 bp, Homo sapiens
gggcacgactacacttcttccaaggggcagaacatggtgtgcggcggcatgggctgcaacaatgattccctggtgcagcagatatttaacgcggcgcagcyggacaactatacccgaataggcttcgccccctcgtcctggatcgacgattatttcgactgggtgaagccacagtcgtcttgctgtcgagtggacaatatc

SEQ ID NO: 8260 - DNA, 201 bp, Homo sapiens
gatgaacgtcttcaaggggaaaccctggatcagcagctgggcagggtcctaggagaagtggctcccagtatgttcctgtcatccttttctgagactgtagmatttttcttaggagcattgtccgtgatgccagccgtgcacaccttctctctctttgcgggattggcagtcttcattgactttcttctgcagattacctgt

SEQ ID NO: 8261 - DNA, 201 bp, Homo sapiens
tgctgcatcggcaaggccaagttgaacaccggatggtgccaaccatcggttgtttggcagcagctttgaacgtagcgcctgtgaactcaggaatgcacagytgacttgggaagcagtattactagatctggaggcaaccacaggacactaaacttctcccagcctcttcaggaaagaaacctcattctttggcaagcagga

SEQ ID NO: 8262 - DNA, 201 bp, Homo sapiens
aactgcaccattttgagtgtgttaaattacttccagaacagccattccgtgctggaccacaagaaaggggacgacttctttgtgtatgccgattaccacaygcactttctgtactgcgtacgggctcctgcctctctgaatgatacaagtttgctccatgacccttgtctgggtacgtttggtggaccagtgttcccgtgg

SEQ ID NO: 8263 - DNA, 201 bp, Homo sapiens
tgccaaatctcaaattttccagatattctacttcaggatgtatttggccatggtcttactgggagccactcacggattaatatttctccctgtcttactcrgttacatagggccatcagtaaataaagccaaaagttgtgccactgaagagcgatacaaaggaacagagcgcgaacggcttctaaatttctagccctctcg

SEQ ID NO: 8264 - DNA, 201 bp, Homo sapiens
cgctctgaagaaagcccgacttatagccagtaatgtcaccgaaaccatgggcattaacggcagtgcctaccgagtatttccttacagtgtgttttatgtcytctacgaacagtacctgaccatcattgacgacactatcttcaacctcggtgtgtccctgggcgcgatatttctggtgaccatggtcctcctgggctgtga

SEQ ID NO: 8265 - DNA, 201 bp, Homo sapiens
gggcacatcaaaagctgtcgcaggcttctggtggattcgaaggtctcactaggcatcgcgggcatcttgatcgtgctgagctcggtggcttgctccttggktgtcttcagctacattgggttgcccttgaccctcattgtgattgaagtcatcccgttcctggtgctggctgttggagtggacaacatcttcattctggtg

SEQ ID NO: 8266 - DNA, 201 bp, Homo sapiens
ctattctccacttctgctaaaggactggatgagaccaattgtgatagcaatatttgtgggtgttctgtcattcagcatcgcagtcctgaacaaagtagatrttggattggatcagtctctttcgatgccagatgactcctacatggtggattatttcaaatccatcagtcagtacctgcatgcgggtccgcctgtgtactt

SEQ ID NO: 8267 - DNA, 201 bp, Homo sapiens
aacatcttcattctggtgcaggcctaccagagagatgaacgtcttcaaggggaaaccctggatcagcagctgggcagggtcctaggagaagtggctcccaktatgttcctgtcatccttttctgagactgtagcatttttcttaggagcattgtccgtgatgccagccgtgcacaccttctctctctttgcgggattggca

SEQ ID NO: 8268 - DNA, 201 bp, Homo sapiens
actacacttcttccaaggggcagaacatggtgtgcggcggcatgggctgcaacaatgattccctggtgcagcagatatttaacgcggcgcagctggacaaytatacccgaataggcttcgccccctcgtcctggatcgacgattatttcgactgggtgaagccacagtcgtcttgctgtcgagtggacaatatcactgacc

SEQ ID NO: 8269 - DNA, 201 bp, Homo sapiens
ctccttggccatggcaccagggtcggagccacgtacttcatgacctaccacaccgtgctgcagacctctgctgactttattgacgctctgaagaaagcccracttatagccagtaatgtcaccgaaaccatgggcattaacggcagtgcctaccgagtatttccttacagtgtgttttatgtcttctacgaacagtacctg

SEQ ID NO: 8270 - DNA, 201 bp, Homo sapiens
agtatgttcctgtcatccttttctgagactgtagcatttttcttaggagcattgtccgtgatgccagccgtgcacaccttctctctctttgcgggattggyagtcttcattgactttcttctgcagattacctgtttcgtgagtctcttggggttagacattaaacgtcaagagaaaaatcggctagacatcttttgctgt

SEQ ID NO: 8271 - DNA, 201 bp, Homo sapiens
gcctttcttccggacggagcagctcatcatccgggcccctctcactgacaaacacatttaccagccatacccttcgggagctgatgtaccctttggacctycgcttgacatacagatactgcaccaggttcttgacttacaaatagccatcgaaaacattactgcctcttatgacaatgagactgtgacacttcaagacat

SEQ ID NO: 8272 - DNA, 201 bp, Homo sapiens
gggcccaggcctgggaaaaagagtttattaattttgtgaaaaactacaagaatcccaatctgaccatttccttcactgctgaacgaagtattgaagatgamctaaatcgtgaaagtgacagtgatgtcttcaccgttgtaattagctatgccatcatgtttctatatatttccctagccttggggcacatcaaaagctgtc

SEQ ID NO: 8273 - DNA, 201 bp, Homo sapiens
aaggcagccgcgtggagcgcgcggaagaggcacttgcccacatgggcagctccgtgttcagtggaatcacacttacaaaatttggagggattgtggtgttsgcttttgccaaatctcaaattttccagatattctacttcaggatgtatttggccatggtcttactgggagccactcacggattaatatttctccctgtct

SEQ ID NO: 8274 - DNA, 201 bp, Homo sapiens
gtgcaggaactctgtccaggattcttctttggcaatgtcagtctctgttgtgatgttcggcagcttcagacactaaaagacaacctgcagctgcctctacrgtttctgtccagatgtccatcctgtttttataacctactgaacctgttttgtgagctgacatgtagccctcgacagagtcagtttttgaatgttacagct

SEQ ID NO: 8275 - DNA, 201 bp, Homo sapiens
tgcaccattttgagtgtgttaaattacttccagaacagccattccgtgctggaccacaagaaaggggacgacttctttgtgtatgccgattaccacacgcrctttctgtactgcgtacgggctcctgcctctctgaatgatacaagtttgctccatgacccttgtctgggtacgtttggtggaccagtgttcccgtggctt

SEQ ID NO: 8276 - DNA, 201 bp, Homo sapiens
gttaaattacttccagaacagccattccgtgctggaccacaagaaaggggacgacttctttgtgtatgccgattaccacacgcactttctgtactgcgtaygggctcctgcctctctgaatgatacaagtttgctccatgacccttgtctgggtacgtttggtggaccagtgttcccgtggcttgtgttgggaggctatga

SEQ ID NO: 8277 - DNA, 201 bp, Homo sapiens
catgggatggagcccatgaacaatgccaccaaaggctgtgacgagtctgtggatgaggtcacagcaccatgtagctgccaagactgctctattgtctgtgkccccaagccccagcccccacctcctcctgctccctggacgatccttggcttggacgccatgtatgtcatcatgtggatcacctacatggcgtttttgctt

SEQ ID NO: 8278 - DNA, 201 bp, Homo sapiens
atatttgtgggtgttctgtcattcagcatcgcagtcctgaacaaagtagatattggattggatcagtctctttcgatgccagatgactcctacatggtggwttatttcaaatccatcagtcagtacctgcatgcgggtccgcctgtgtactttgtcctggaggaagggcacgactacacttcttccaaggggcagaacatg

SEQ ID NO: 8279 - DNA, 201 bp, Homo sapiens
cttgatcgtgctgagctcggtggcttgctccttgggtgtcttcagctacattgggttgcccttgaccctcattgtgattgaagtcatcccgttcctggtgstggctgttggagtggacaacatcttcattctggtgcaggcctaccagagagatgaacgtcttcaaggggaaaccctggatcagcagctgggcagggtcct

SEQ ID NO: 8280 - DNA, 201 bp, Homo sapiens
tggcttgctccttgggtgtcttcagctacattgggttgcccttgaccctcattgtgattgaagtcatcccgttcctggtgctggctgttggagtggacaayatcttcattctggtgcaggcctaccagagagatgaacgtcttcaaggggaaaccctggatcagcagctgggcagggtcctaggagaagtggctcccagta

SEQ ID NO: 8281 - DNA, 201 bp, Homo sapiens
gtgtccctgggcgcgatatttctggtgaccatggtcctcctgggctgtgagctctggtctgcagtcatcatgtgtgccaccatcgccatggtcttggtcawcatgtttggagttatgtggctctggggcatcagtctgaacgctgtatccttggtcaacctggtgatgagctgtggcatctccgtggagttctgcagccac

SEQ ID NO: 8282 - DNA, 201 bp, Homo sapiens
cagcagatatttaacgcggcgcagctggacaactatacccgaataggcttcgccccctcgtcctggatcgacgattatttcgactgggtgaagccacagtygtcttgctgtcgagtggacaatatcactgaccagttctgcaatgcttcagtggttgaccctgcctgcgttcgctgcaggcctctgactccggaaggcaaa

SEQ ID NO: 8283 - DNA, 201 bp, Homo sapiens
gacgcctgtaatgccaccaactggattgaatacatgttcaataaggacaatggacaggcaccttttaccatcactcctgtgttttcagattttccagtccrtgggatggagcccatgaacaatgccaccaaaggctgtgacgagtctgtggatgaggtcacagcaccatgtagctgccaagactgctctattgtctgtggc

SEQ ID NO: 8284 - DNA, 201 bp, Homo sapiens
gaaaggcagccgcgtggagcgcgcggaagaggcacttgcccacatgggcagctccgtgttcagtggaatcacacttacaaaatttggagggattgtggtgktggcttttgccaaatctcaaattttccagatattctacttcaggatgtatttggccatggtcttactgggagccactcacggattaatatttctccctgt

SEQ ID NO: 8285 - DNA, 201 bp, Homo sapiens
aatggacaggcaccttttaccatcactcctgtgttttcagattttccagtccatgggatggagcccatgaacaatgccaccaaaggctgtgacgagtctgkggatgaggtcacagcaccatgtagctgccaagactgctctattgtctgtggccccaagccccagcccccacctcctcctgctccctggacgatccttggc

SEQ ID NO: 8286 - DNA, 201 bp, Homo sapiens
gttctgcagccacataaccagagcgttcacggtgagcatgaaaggcagccgcgtggagcgcgcggaagaggcacttgcccacatgggcagctccgtgttcrgtggaatcacacttacaaaatttggagggattgtggtgttggcttttgccaaatctcaaattttccagatattctacttcaggatgtatttggccatggt

SEQ ID NO: 8287 - DNA, 201 bp, Homo sapiens
aatttggagggattgtggtgttggcttttgccaaatctcaaattttccagatattctacttcaggatgtatttggccatggtcttactgggagccactcayggattaatatttctccctgtcttactcagttacatagggccatcagtaaataaagccaaaagttgtgccactgaagagcgatacaaaggaacagagcgcg

SEQ ID NO: 8288 - DNA, 201 bp, Homo sapiens
gggcatcagtctgaacgctgtatccttggtcaacctggtgatgagctgtggcatctccgtggagttctgcagccacataaccagagcgttcacggtgagcrtgaaaggcagccgcgtggagcgcgcggaagaggcacttgcccacatgggcagctccgtgttcagtggaatcacacttacaaaatttggagggattgtggt

SEQ ID NO: 8289 - DNA, 201 bp, Homo sapiens
gtcttcaaggggaaaccctggatcagcagctgggcagggtcctaggagaagtggctcccagtatgttcctgtcatccttttctgagactgtagcatttttyttaggagcattgtccgtgatgccagccgtgcacaccttctctctctttgcgggattggcagtcttcattgactttcttctgcagattacctgtttcgtga

SEQ ID NO: 8290 - DNA, 201 bp, Homo sapiens
atccatcagtcagtacctgcatgcgggtccgcctgtgtactttgtcctggaggaagggcacgactacacttcttccaaggggcagaacatggtgtgcggcrgcatgggctgcaacaatgattccctggtgcagcagatatttaacgcggcgcagctggacaactatacccgaataggcttcgccccctcgtcctggatcga

SEQ ID NO: 8291 - DNA, 201 bp, Homo sapiens
acaaagtagatattggattggatcagtctctttcgatgccagatgactcctacatggtggattatttcaaatccatcagtcagtacctgcatgcgggtccrcctgtgtactttgtcctggaggaagggcacgactacacttcttccaaggggcagaacatggtgtgcggcggcatgggctgcaacaatgattccctggtgc

SEQ ID NO: 8292 - DNA, 201 bp, Homo sapiens
gatcgacgattatttcgactgggtgaagccacagtcgtcttgctgtcgagtggacaatatcactgaccagttctgcaatgcttcagtggttgaccctgccygcgttcgctgcaggcctctgactccggaaggcaaacagaggcctcaggggggagacttcatgagattcctgcccatgttcctttcggataaccctaaccc

SEQ ID NO: 8293 - DNA, 201 bp, Homo sapiens
tggtgttggcttttgccaaatctcaaattttccagatattctacttcaggatgtatttggccatggtcttactgggagccactcacggattaatatttctycctgtcttactcagttacatagggccatcagtaaataaagccaaaagttgtgccactgaagagcgatacaaaggaacagagcgcgaacggcttctaaatt

SEQ ID NO: 8294 - DNA, 201 bp, Homo sapiens
gtcttactgggagccactcacggattaatatttctccctgtcttactcagttacatagggccatcagtaaataaagccaaaagttgtgccactgaagagcratacaaaggaacagagcgcgaacggcttctaaatttctagccctctcgcagggcatcctgactgaactgtgtctaagggtcggtcggtttaccactggac

SEQ ID NO: 8295 - DNA, 201 bp, Homo sapiens
agctgccaagactgctctattgtctgtggccccaagccccagcccccacctcctcctgctccctggacgatccttggcttggacgccatgtatgtcatcakgtggatcacctacatggcgtttttgcttgtgttttttggagcattttttgcagtgtggtgctacagaaaacggtattttgtctccgagtacactcccatc

SEQ ID NO: 8296 - DNA, 201 bp, Homo sapiens
gttttcagattttccagtccatgggatggagcccatgaacaatgccaccaaaggctgtgacgagtctgtggatgaggtcacagcaccatgtagctgccaasactgctctattgtctgtggccccaagccccagcccccacctcctcctgctccctggacgatccttggcttggacgccatgtatgtcatcatgtggatcac

SEQ ID NO: 8297 - DNA, 201 bp, Homo sapiens
tctgcagtcatcatgtgtgccaccatcgccatggtcttggtcaacatgtttggagttatgtggctctggggcatcagtctgaacgctgtatccttggtcarcctggtgatgagctgtggcatctccgtggagttctgcagccacataaccagagcgttcacggtgagcatgaaaggcagccgcgtggagcgcgcggaagag

SEQ ID NO: 8298 - DNA, 201 bp, Homo sapiens
ttacaatactacgtcggacagagttttgccaatgcaatgtacaatgcctgccgggatgtggaggccccctcaagtaatgacaaggccctgggactcctgtrtgggaaggacgctgacgcctgtaatgccaccaactggattgaatacatgttcaataaggacaatggacaggcaccttttaccatcactcctgtgttttca

SEQ ID NO: 8299 - DNA, 201 bp, Homo sapiens
ctgaagaaagcccgacttatagccagtaatgtcaccgaaaccatgggcattaacggcagtgcctaccgagtatttccttacagtgtgttttatgtcttctrcgaacagtacctgaccatcattgacgacactatcttcaacctcggtgtgtccctgggcgcgatatttctggtgaccatggtcctcctgggctgtgagctc

SEQ ID NO: 8300 - DNA, 201 bp, Homo sapiens
actccggaaggcaaacagaggcctcaggggggagacttcatgagattcctgcccatgttcctttcggataaccctaaccccaagtgtggcaaagggggacrtgctgcctatagttctgcagttaacatcctccttggccatggcaccagggtcggagccacgtacttcatgacctaccacaccgtgctgcagacctctgct

SEQ ID NO: 8301 - DNA, 201 bp, Homo sapiens
ggccatggcaccagggtcggagccacgtacttcatgacctaccacaccgtgctgcagacctctgctgactttattgacgctctgaagaaagcccgacttayagccagtaatgtcaccgaaaccatgggcattaacggcagtgcctaccgagtatttccttacagtgtgttttatgtcttctacgaacagtacctgaccatc

SEQ ID NO: 8302 - DNA, 201 bp, Homo sapiens
agccgtgcacaccttctctctctttgcgggattggcagtcttcattgactttcttctgcagattacctgtttcgtgagtctcttggggttagacattaaasgtcaagagaaaaatcggctagacatcttttgctgtgtcagaggtgctgaagatggaacaagcgtccaggcctcagagagctgtttgtttcgcttcttcaa

SEQ ID NO: 8303 - DNA, 201 bp, Homo sapiens
ctttcggataaccctaaccccaagtgtggcaaagggggacatgctgcctatagttctgcagttaacatcctccttggccatggcaccagggtcggagccaygtacttcatgacctaccacaccgtgctgcagacctctgctgactttattgacgctctgaagaaagcccgacttatagccagtaatgtcaccgaaaccatg

SEQ ID NO: 8304 - DNA, 201 bp, Homo sapiens
cttccagaacagccattccgtgctggaccacaagaaaggggacgacttctttgtgtatgccgattaccacacgcactttctgtactgcgtacgggctcctkcctctctgaatgatacaagtttgctccatgacccttgtctgggtacgtttggtggaccagtgttcccgtggcttgtgttgggaggctatgatgatcaaaa

SEQ ID NO: 8305 - DNA, 201 bp, Homo sapiens
gtgaccctgtcagcgcagcatttgagggctgcttgaggcggctgttcacacgctgggggtctttctgcgtccgaaaccctggctgtgtcattttcttctcrctggtcttcattactgcgtgttcgtcaggcctggtgtttgtccgggtcacaaccaatccagttgacctctggtcagcccccagcagccaggctcgcctgg

SEQ ID NO: 8306 - DNA, 201 bp, Homo sapiens
cagtgtggtgctacagaaaacggtattttgtctccgagtacactcccatcgatagcaatatagctttttctgttaatgcaagtgacaaaggagaggcgtcytgctgtgaccctgtcagcgcagcatttgagggctgcttgaggcggctgttcacacgctgggggtctttctgcgtccgaaaccctggctgtgtcattttct

SEQ ID NO: 8307 - DNA, 201 bp, Homo sapiens
agtggacaatatcactgaccagttctgcaatgcttcagtggttgaccctgcctgcgttcgctgcaggcctctgactccggaaggcaaacagaggcctcagkggggagacttcatgagattcctgcccatgttcctttcggataaccctaaccccaagtgtggcaaagggggacatgctgcctatagttctgcagttaacat

SEQ ID NO: 8308 - DNA, 201 bp, Homo sapiens
atatttaacgcggcgcagctggacaactatacccgaataggcttcgccccctcgtcctggatcgacgattatttcgactgggtgaagccacagtcgtcttrctgtcgagtggacaatatcactgaccagttctgcaatgcttcagtggttgaccctgcctgcgttcgctgcaggcctctgactccggaaggcaaacagagg

SEQ ID NO: 8309 - DNA, 201 bp, Homo sapiens
cgattatttcgactgggtgaagccacagtcgtcttgctgtcgagtggacaatatcactgaccagttctgcaatgcttcagtggttgaccctgcctgcgttygctgcaggcctctgactccggaaggcaaacagaggcctcaggggggagacttcatgagattcctgcccatgttcctttcggataaccctaaccccaagtg

SEQ ID NO: 8310 - DNA, 201 bp, Homo sapiens
tgtccgggtcacaaccaatccagttgacctctggtcagcccccagcagccaggctcgcctggaaaaagagtactttgaccagcactttgggcctttcttcyggacggagcagctcatcatccgggcccctctcactgacaaacacatttaccagccatacccttcgggagctgatgtaccctttggacctccgcttgacat

SEQ ID NO: 8311 - DNA, 201 bp, Homo sapiens
caacaatgattccctggtgcagcagatatttaacgcggcgcagctggacaactatacccgaataggcttcgccccctcgtcctggatcgacgattatttcractgggtgaagccacagtcgtcttgctgtcgagtggacaatatcactgaccagttctgcaatgcttcagtggttgaccctgcctgcgttcgctgcaggcc

SEQ ID NO: 8312 - DNA, 201 bp, Homo sapiens
ctaccagagagatgaacgtcttcaaggggaaaccctggatcagcagctgggcagggtcctaggagaagtggctcccagtatgttcctgtcatccttttctragactgtagcatttttcttaggagcattgtccgtgatgccagccgtgcacaccttctctctctttgcgggattggcagtcttcattgactttcttctgca

SEQ ID NO: 8313 - DNA, 201 bp, Homo sapiens
ttcatgtattaagatacttctttaactttctcaggaatgtttctcttagatccagtgagaataagatggatagcagcaatcttgcagtaatatttgcaccraatcttcttcagacaagtgaaggacatgaaaagatgtcttctaacgcagaaaagaaggtacgattacaggctgcagtagtacagactcttatcgattatg

SEQ ID NO: 8314 - DNA, 201 bp, Homo sapiens
atcaggaaaagcaggctgcttttctcctaaaatcagccataaagaaaaggttcgaagatctctgcgtttgaaattcaatctagggaaaaatggcagagaartaaatggatgttctggtgtcaatagatatgaaagtgttggttggcgacttgcaaatcaacaaagtttaaaaaatcgaattgaatctgtaaaaacaggttt

SEQ ID NO: 8315 - DNA, 201 bp, Homo sapiens
atggagttaccctcgaaatctttcttaaagatgaggaagcacccagattcagtgaatgcttctcttaggtctactacagtttataaacagaagatcttatytgatggccaagttaaggttcccttggatgatctgactaatcatgatatagtaaaaccagttgtaaataacaacatgggcatttcttctgggataaataac

SEQ ID NO: 8316 - DNA, 201 bp, Homo sapiens
acggtttcaccgtgttagccaggatggtctcgatctcctgaccttgtgatccgcccgcctcagcctcccaaagtgctgggattacaggcatgagccaccaygcccggctagactttacctttctaaagaaattgtttactggatttataagaagttaatttttgaaaatgacatatttttgtgtgatagaaagaatggagc

SEQ ID NO: 8317 - DNA, 201 bp, Homo sapiens
tatcagttcacatcgatacaagctcagaagggtcatctcagagttcactctctcctgtactcattggtggaaaccatttgatcactgcaggtgtgccaagrcgaagtaaaagaattgcaggcaaaaaagtttgcagagtggaatcaggaaaagcaggctgcttttctcctaaaatcagccataaagaaaaggttcgaagat

SEQ ID NO: 8318 - DNA, 201 bp, Homo sapiens
gctgggactacaggtgcccgccaccacgcccagctaattttttgtatttttagtagagacggtttcaccgtgttagccaggatggtctcgatctcctgacsttgtgatccgcccgcctcagcctcccaaagtgctgggattacaggcatgagccaccacgcccggctagactttacctttctaaagaaattgtttactgga

SEQ ID NO: 8319 - DNA, 201 bp, Homo sapiens
agggtcatctcagagttcactctctcctgtactcattggtggaaaccatttgatcactgcaggtgtgccaaggcgaagtaaaagaattgcaggcaaaaaartttgcagagtggaatcaggaaaagcaggctgcttttctcctaaaatcagccataaagaaaaggttcgaagatctctgcgtttgaaattcaatctagggaa

SEQ ID NO: 8320 - DNA, 201 bp, Homo sapiens
ctacagtttataaacagaagatcttatctgatggccaagttaaggttcccttggatgatctgactaatcatgatatagtaaaaccagttgtaaataacaayatgggcatttcttctgggataaataacagggtccttaggagaccatcagaaagaggaagggcctggtacaaaggttctccaaaacatcctatcggaaaaa

SEQ ID NO: 8321 - DNA, 201 bp, Homo sapiens
gtatagcagacaacctacagggcataagttggcgagtcttggtgatacagcttctcctttggtcaaatcagtgagctgtgacggtgctctttcctcttgtrtagaaagtgcatcaaaagattcctctgtttcatgtatcaaatcaggtcctaaagaacagaagtccatgtcatgtgaagagtcaaatattggtgcaatttc

SEQ ID NO: 8322 - DNA, 201 bp, Homo sapiens
actacctgaactggcttttctgagagatgaatcaataatgaaacatgtctgttttaaaaactaccacatgtgactcctatttttgttagctgaaagctgcwatacggagtattacaggaatgtgaaggtgactagcttgaaggtagggtaactagagagccagaaaagttttgttttaaacttgatttaatgcgtttttat

SEQ ID NO: 8323 - DNA, 141 bp, Homo sapiens
tttttattttttcttatacaaaatagagataatgttgctaacttcatggaatatttgaggaaatgatatgaaagtgtctggacgtgcagtaacctcatggsttcttctcactgtcttataaatgtaaataaagatctaata

SEQ ID NO: 8324 - DNA, 201 bp, Homo sapiens
aaccaaatagaataaaagtcaagtcacctcttaagtttcagcgtactcctgttcgtcagtccgtcagaagaattaattctttgttggagtatagcagacarcctacagggcataagttggcgagtcttggtgatacagcttctcctttggtcaaatcagtgagctgtgacggtgctctttcctcttgtatagaaagtgcat

SEQ ID NO: 8325 - DNA, 201 bp, Homo sapiens
tagatccagtgagaataagatggatagcagcaatcttgcagtaatatttgcaccaaatcttcttcagacaagtgaaggacatgaaaagatgtcttctaacrcagaaaagaaggtacgattacaggctgcagtagtacagactcttatcgattatgcatcagatattgggcgtgtaccagactttatcctggaaaagatacc

SEQ ID NO: 8326 - DNA, 201 bp, Homo sapiens
gtcagccttcgtggaaggagatgcctcataaatttgtgatagccgtgctgatggaatacattcgttctcttaaccagtttcagattgcagtacagcattayctacatgaacttgttatcaaaacccttgtccagcacaacctcttttatatgctgcatcagttcctgcagtaccacgtcctcagcgactccaaacctttgg

SEQ ID NO: 8327 - DNA, 201 bp, Homo sapiens
aagcagggcagagccgaagcagcccgctcctcaagaggccggtgcggacccaggcggtgctggaccagtcagatgtgtacacccatgtcctgtcagccttygtggaaggagatgcctcataaatttgtgatagccgtgctgatggaatacattcgttctcttaaccagtttcagattgcagtacagcattacctacatgaa

SEQ ID NO: 8328 - DNA, 201 bp, Homo sapiens
taccagagaaacggagtctgaaactcttgaagagccacaatctcaatgtgaattggtacatgtactgccccgagagcgccgtgatcttgctgtctaccacrgtcctggagaatgtcctgcagccttttcactttagggctggcactatgtcgaagctgcccaaatttgagattgaattaccagctgcgcctaagtcaacta

SEQ ID NO: 8329 - DNA, 201 bp, Homo sapiens
gttcacagatgttaagtgagtcagacagagcatcgctgcccgtgatagccactgtttttgataaactcaaccatgagtataaaaagtacctggatgccgascagagttatgcgatggcggtggaagcagggcagagccgaagcagcccgctcctcaagaggccggtgcggacccaggcggtgctggaccagtcagatgtgt

SEQ ID NO: 8330 - DNA, 201 bp, Homo sapiens
agtcagacagagcatcgctgcccgtgatagccactgtttttgataaactcaaccatgagtataaaaagtacctggatgccgagcagagttatgcgatggcrgtggaagcagggcagagccgaagcagcccgctcctcaagaggccggtgcggacccaggcggtgctggaccagtcagatgtgtacacccatgtcctgtcag

SEQ ID NO: 8331 - DNA, 201 bp, Homo sapiens
tagtcgtgcatcatcaggatacagagacatcggtaatattcgatatcaagttacggggagagtttgacggctccgttaccttccaccaccccgtgcttccygctcgatcgatccagccctatcagatccccatcacaggtcctgctgccgtgaccagccagtctcctgttccatgtaaactatgtggattcttcatcttgg

SEQ ID NO: 8332 - DNA, 201 bp, Homo sapiens
ctgcccgtgatagccactgtttttgataaactcaaccatgagtataaaaagtacctggatgccgagcagagttatgcgatggcggtggaagcagggcagarccgaagcagcccgctcctcaagaggccggtgcggacccaggcggtgctggaccagtcagatgtgtacacccatgtcctgtcagccttcgtggaaggagat

SEQ ID NO: 8333 - DNA, 201 bp, Homo sapiens
ccttcgtggaaaagaaggagatgcctcataaatttgtgatagccgtgctgatggaatacattcgttctcttaaccagtttcagattgcagtacagcattayctacatgaacttgttatcaaaacccttgtccagcacaacctcttttatatgctgcatcagttcctgcagtaccacgtcctcagcgactccaaacctttgg

SEQ ID NO: 8334 - DNA, 201 bp, Homo sapiens
aagcagggcagagccgaagcagcccgctcctcaagaggccggtgcggacccaggcggtgctggaccagtcagatgtgtacacccatgtcctgtcagccttygtggaaaagaaggagatgcctcataaatttgtgatagccgtgctgatggaatacattcgttctcttaaccagtttcagattgcagtacagcattacctac

SEQ ID NO: 8335 - DNA, 201 bp, Homo sapiens; identical to SEQ ID NO: 8328

SEQ ID NO: 8336 - DNA, 201 bp, Homo sapiens; identical to SEQ ID NO: 8329

SEQ ID NO: 8337 - DNA, 201 bp, Homo sapiens; identical to SEQ ID NO: 8330

SEQ ID NO: 8338 - DNA, 201 bp, Homo sapiens
tagtcgtgcatcatcaggatacagagacatcggtaatattcgatatcaagttacggggagagtttgacggctccgttaccttccaccaccccgtgcttccygctcgatcgatccagccctatcagatccccatcacaggtcctgctgccgtgaccagccagtctcctgttccatgtaaactctatgtggattcttcatctt

SEQ ID NO: 8339 - DNA, 201 bp, Homo sapiens
ctgcccgtgatagccactgtttttgataaactcaaccatgagtataaaaagtacctggatgccgagcagagttatgcgatggcggtggaagcagggcagarccgaagcagcccgctcctcaagaggccggtgcggacccaggcggtgctggaccagtcagatgtgtacacccatgtcctgtcagccttcgtggaaaagaag

SEQ ID NO: 8340 - DNA, 201 bp, Homo sapiens; identical to SEQ ID NO: 8333

SEQ ID NO: 8341 - DNA, 201 bp, Homo sapiens; identical to SEQ ID NO: 8334

SEQ ID NO: 8342 - DNA, 201 bp, Homo sapiens; identical to SEQ ID NO: 8328

SEQ ID NO: 8343 - DNA, 201 bp, Homo sapiens; identical to SEQ ID NO: 8329

SEQ ID NO: 8344 - DNA, 201 bp, Homo sapiens; identical to SEQ ID NO: 8330

SEQ ID NO: 8345 - DNA, 201 bp, Homo sapiens
tagtcgtgcatcatcaggatacagagacatcggtaatattcgatatcaagttacggggagagtttgacggctccgttaccttccaccaccccgtgcttccygctcgatcgatccagccctatcagatccccatcacaggtcctgctgccgtgaccagccagtctcctgttccatgtaaactctattcttcatcttggattg

SEQ ID NO: 8346 - DNA, 201 bp, Homo sapiens; identical to SEQ ID NO: 8339

SEQ ID NO: 8347 - DNA, 201 bp, Homo sapiens
ataatccgcccactagaatcctccctgttagactaaacgaagtgtctggcatggcaattaatcactaatgaattatgcgaaagcaacatatttgataaccrttgcagtaaatcatgagtagtcgcatgtgtggacatcagtaggcaagtaaccagttttactaatgcattcatcgctcatcttcattgctcatggtatgtc

SEQ ID NO: 8348 - DNA, 201 bp, Homo sapiens
ctggggctcctccagtcccattccgtccaggcccattacctcctttccccagcagcagtgactccttcggagcccctccacaagttccatctaggcctacragggccccgcccagtgtcccaagccggagaccacccccatcaccaactcgtcccactataatccgcccactagaatcctccctgttagactaaacgaagt

SEQ ID NO: 8349 - DNA, 201 bp, Homo sapiens
tgtctagcaagcacatctttgcactctttaatacagagcaaaggaatgtatacaaagactatcgcttccttgagctggcatgtgattcccaggaggatgtygacagctggaaggcatctctactaagagctggggtctatcctgacaaatctgtagctgaaaatgatgagaatggacaagcagaaaacttttccatggacc

SEQ ID NO: 8350 - DNA, 201 bp, Homo sapiens
tgatggaggaatctgctgagcaggctcagcgccgggatgagatgcttcgaatgtatcaagcactgaaagaagcccttgggataattggggacatcagcacrgccaccgtgtccactccggcaccccctccagtggatgactcctggatacagcactctcgcaggtcacctcctccaagccccacaacccaaaggaggccaa

SEQ ID NO: 8351 - DNA, 201 bp, Homo sapiens
cccatcaccaactcgtcccactataatccgcccactagaatcctccctgttagactaaacgaagtgtctggcatggcaattaatcactaatgaattatgcraaagcaacatatttgataaccgttgcagtaaatcatgagtagtcgcatgtgtggacatcagtaggcaagtaaccagttttactaatgcattcatcgctca

SEQ ID NO: 8352 - DNA, 201 bp, Homo sapiens
ggatgacagtaattctgttgtctaccattaatgctactacctactccataattgcctatttagctcctcttttcttcctttttatttcataagactgctargaagtgattttttaaaattaggactccttaagaataaacttttccagaagcacgaggtagtttgcaaaggaaaagtctgcactgtttgctctaaagagct

SEQ ID NO: 8353 - DNA, 201 bp, Homo sapiens
gactcagaaactgctaaccttttagaggctttatatgttgtactgaccaaggtaggtttgtatagcagccctatactttggggatcatttgcctaccatgrcatatatttgaaattgctttggacaagttttctaggctatctaccaggtagctcattaaacgtaattcttcagatatgagatagtgggcttagacctaag

SEQ ID NO: 8354 - DNA, 201 bp, Homo sapiens
actcatcctgtctggttgctatgtttaaaattatgtggtgctgtgtaggtgaaactttaagaatatttttgaagcatatgtaatatatgcactgctatttktgtgtgtgtgtgtgtctttgtatatatgtaagaatgtgtgtatgtgtgagagcaagagagaggaaactcaaagaggagtgtttgtcttaagacctgttca

SEQ ID NO: 8355 - DNA, 201 bp, Homo sapiens
atactggtatattggtgagacttctcacttctggttggaggtttcacatatggctcaactcaagtcattaatctctttttaatttttactcttgaattccytaaacttcgctcattatgaaatgttttaaaattatgacaaaaattactctgtctaaccacttgccttgtctgctaccagtttgttaaaaattattccccc

SEQ ID NO: 8356 - DNA, 201 bp, Homo sapiens
ggtaggtcatccactttttcaggtaaacatttttcatttggcaaatggcataattatttgaaagtgacaggaatctcctcagaatgaagaataaagcctamtaggtctctaactgttgaactcatgaaagaagatagtgtatgagacttaagccatgagttttgtatcatttcaattagaagactactagctgtgagctca

SEQ ID NO: 8357 - DNA, 201 bp, Homo sapiens
ctcaaatgagtcttctagatactcttactcatcctgtctggttgctatgtttaaaattatgtggtgctgtgtaggtgaaactttaagaatatttttgaagsatatgtaatatatgcactgctatttgtgtgtgtgtgtgtgtctttgtatatatgtaagaatgtgtgtatgtgtgagagcaagagagaggaaactcaaaga

SEQ ID NO: 8358 - DNA, 130 bp, Homo sapiens
tctgcatcctactgctattttcattttatmgatggaatactttgaagcacgaaaaatcattatatcttgaaataatttttaaaataatccaataacaaactcagaactactgaagaataataaagaatat

SEQ ID NO: 8359 - DNA, 201 bp, Homo sapiens
tggaatactttgaagcacgaaaaatcattatatcttgaaataatttttaaaataatccaataacaaactcagaactactgaagaataataaagaatatgcygagtttctacattgcaaaggaaagaaatttacagattttgatgaagttcgccttgagattgaagcagaaacagatcgcgtgactggaatgaataaaggca

SEQ ID NO: 8360 - DNA, 201 bp, Homo sapiens; identical to SEQ ID NO: 8347

SEQ ID NO: 8361 - DNA, 201 bp, Homo sapiens; identical to SEQ ID NO: 8348

SEQ ID NO: 8362 - DNA, 201 bp, Homo sapiens; identical to SEQ ID NO: 8349

SEQ ID NO: 8363 - DNA, 201 bp, Homo sapiens; identical to SEQ ID NO: 8350

SEQ ID NO: 8364 - DNA, 201 bp, Homo sapiens; identical to SEQ ID NO: 8351

SEQ ID NO: 8365 - DNA, 201 bp, Homo sapiens; identical to SEQ ID NO: 8352

SEQ ID NO: 8366 - DNA, 201 bp, Homo sapiens; identical to SEQ ID NO: 8353

SEQ ID NO: 8367 - DNA, 201 bp, Homo sapiens; identical to SEQ ID NO: 8354

SEQ ID NO: 8368 - DNA, 201 bp, Homo sapiens; identical to SEQ ID NO: 8355

SEQ ID NO: 8369 - DNA, 201 bp, Homo sapiens; identical to SEQ ID NO: 8356

SEQ ID NO: 8370 - DNA, 201 bp, Homo sapiens; identical to SEQ ID NO: 8357

SEQ ID NO: 8371 - DNA, 201 bp, Homo sapiens
tcgagaacttcgtgggcagggactttctccctcgagggtcgggcattgtaacaagacgacctcttgtgctgcagcttgttacttctaaagcagaatatgcygagtttctacattgcaaaggaaagaaatttacagattttgatgaagttcgccttgagattgaagcagaaacagatcgcgtgactggaatgaataaaggca

SEQ ID NO: 8372 - DNA, 201 bp, Homo sapiens; identical to SEQ ID NO: 8371

SEQ ID NO: 8373 - DNA, 201 bp, Homo sapiens; identical to SEQ ID NO: 8347

SEQ ID NO: 8374 - DNA, 201 bp, Homo sapiens; identical to SEQ ID NO: 8348

SEQ ID NO: 8375 - DNA, 201 bp, Homo sapiens; identical to SEQ ID NO: 8349

SEQ ID NO: 8376 - DNA, 201 bp, Homo sapiens; identical to SEQ ID NO: 8350

SEQ ID NO: 8377 - DNA, 201 bp, Homo sapiens; identical to SEQ ID NO: 8351

SEQ ID NO: 8378 - DNA, 201 bp, Homo sapiens; identical to SEQ ID NO: 8352

SEQ ID NO: 8379 - DNA, 201 bp, Homo sapiens; identical to SEQ ID NO: 8353

SEQ ID NO: 8380 - DNA, 201 bp, Homo sapiens; identical to SEQ ID NO: 8354

SEQ ID NO: 8381 - DNA, 201 bp, Homo sapiens; identical to SEQ ID NO: 8355

SEQ ID NO: 8382 - DNA, 201 bp, Homo sapiens; identical to SEQ ID NO: 8356

SEQ ID NO: 8383 - DNA, 201 bp, Homo sapiens; identical to SEQ ID NO: 8357

SEQ ID NO: 8384 - DNA, 201 bp, Homo sapiens; identical to SEQ ID NO: 8371

SEQ ID NO: 8385 - DNA, 201 bp, Homo sapiens; identical to SEQ ID NO: 8347

SEQ ID NO: 8386 - DNA, 201 bp, Homo sapiens; identical to SEQ ID NO: 8348

SEQ ID NO: 8387 - DNA, 201 bp, Homo sapiens; identical to SEQ ID NO: 8349

SEQ ID NO: 8388 - DNA, 201 bp, Homo sapiens; identical to SEQ ID NO: 8350

SEQ ID NO: 8389 - DNA, 201 bp, Homo sapiens; identical to SEQ ID NO: 8351

SEQ ID NO: 8390 - DNA, 201 bp, Homo sapiens; identical to SEQ ID NO: 8352

SEQ ID NO: 8391 - DNA, 201 bp, Homo sapiens; identical to SEQ ID NO: 8353

SEQ ID NO: 8392 - DNA, 201 bp, Homo sapiens; identical to SEQ ID NO: 8354

SEQ ID NO: 8393 - DNA, 201 bp, Homo sapiens; identical to SEQ ID NO: 8355

SEQ ID NO: 8394 - DNA, 201 bp, Homo sapiens; identical to SEQ ID NO: 8356

SEQ ID NO: 8395 - DNA, 201 bp, Homo sapiens; identical to SEQ ID NO: 8357

SEQ ID NO: 8396 - DNA, 158 bp, Homo sapiens
atgccagacaaccagaaccccataaatgtctgctctggagaaaccaggaaggaagcayggcctgaggcactcgaggggctctcaacaccagcctcaaatggcagatgcgaaagccatggagttgagctgcagcgaagcacctctttacggagggccgg

SEQ ID NO: 8397 - DNA, 201 bp, Homo sapiens
ggcacgtgttgtgattggtcagtcactgagccagggatacagtccggacttgcttagtacctaagcctaatgctggtggggtttcaagacatggttcagcmtcatcttttaacaaggcccagaggcccagagcccgcatcaagtcattttgatgtaaatagtgaactttgttagagccctcacttctatcaatcagctgtc

SEQ ID NO: 8398 - DNA, 201 bp, Homo sapiens
ggttccggccatcagatacttcctttccatgaaagcagcaaggattcttgtaaaaatggctccagtatgacaaagtgcagttgtacgttgacatctccccygggactgtggactggaaccacatctactttgaaagatttggacacctcccacactgagtccccaaccccccatgactcaaattcacaccgccctcaactg

SEQ ID NO: 8399 - DNA, 201 bp, Homo sapiens
ctgaccctgaaccacacagccgagcatttgttggaggcagatattaaactcttccggaaatacttttgggatagagcctttcttgtcaaggcctttgagcmagaagccaggccagaggaaagaacagctatgccctccagcggtgcagaaactgaagaagggttgagaaccaccaagcttgatgctggggctagggaggaa

SEQ ID NO: 8400 - DNA, 201 bp, Homo sapiens
gttcgctcacgttcttattcttgctcatcacccaaaatttctttaggaaaaactcgtttggtgcgtgaattaacagtatgcagttcaagtgaagagcaaaragcttacagcttatcggagccaccaagagaaaacagaattcaggaagaagaatgggataaatacatcatacctgccaaatcagagtctgaaaaatataaa

SEQ ID NO: 8401 - DNA, 201 bp, Homo sapiens
gcggacaggcagcatgaggagctggccaatgtgcaccagcttcagcaccagctccagcaggagcagcggcgctggctgcgcaggtgtgagcagcagcagcrggcgcaggcgaccagggagagctggctgcaggagcgggagcgggagtgccagtcgcaggaggagctgctgctgcggagccggggcgagctggacctccag

SEQ ID NO: 8402 - DNA, 201 bp, Homo sapiens
gtctctccttgcacccttcttcctccgtgcctgttggattgccgactggaaggagggagactgtgggacaggtccatccattgtccagaagtgttccaggyaccaccttggaaagcttcaggaggtcagccacatccttggagtctgagagtgaccataacagctgcagaagcaggtctcattctgatgagctgctacagt

SEQ ID NO: 8403 - DNA, 201 bp, Homo sapiens
aacatcaagtagacctcaaggtggacccttctcagccttcgaatgtcagtcacaaactgtggacagccgctggttccggccatcagatacttcctttccawgaaagcagcaaggattcttgtaaaaatggctccagtatgacaaagtgcagttgtacgttgacatctcccccgggactgtggactggaaccacatctactt

SEQ ID NO: 8404 - DNA, 201 bp, Homo sapiens
caggagacggtgacggtatctgtgtgcctctgctcggaaggttactctccggtgaccatgggctctggctcagtgacctacgtggacaacatggcttgcakgctggctcgtctgctggtgacgcaggccaatcgcctcacagcctgcagccaccagaccctgctgaccccatttgccttgacggcaggagcactgcctgcc

SEQ ID NO: 8405 - DNA, 201 bp, Homo sapiens
catacacgaagctcaaaaatggacatgtgtttaggaagcaggcactgatgagtgaagaaaggactctgttatatgatggccttgtttactggaaaactgcyacaggtcgtttcaaagatatcctagctctacttctaactgatgtgctgctctttttacaagaaaaagaccagaaatacatctttgcagccgttgatcaga

SEQ ID NO: 8406 - DNA, 201 bp, Homo sapiens
ttacattcactcatcggaaacgctgaccctgaccctgaaccacacagccgagcatttgttggaggcagatattaaactcttccggaaatacttttgggatmgagcctttcttgtcaaggcctttgagccagaagccaggccagaggaaagaacagctatgccctccagcggtgcagaaactgaagaagggttgagaaccac

SEQ ID NO: 8407 - DNA, 201 bp, Homo sapiens
gcagcagcgggcgcaggcgaccagggagagctggctgcaggagcgggagcgggagtgccagtcgcaggaggagctgctgctgcggagccggggcgagctgkacctccagctccaggagtaccagcacagcctggagcggctgagggagggccagcgcctggtggagagggagcaggcgaggatgcgggcccagcagagcct

SEQ ID NO: 8408 - DNA, 201 bp, Homo sapiens
aataggatgactagccctcggaataaatcaaagacaaaaagcaaggatgccaaagataaagagaagctgaatcgacatcagtttgccccaggaacattctytggggttctgcagtgtttggtttgtgataaaacactcctggggaaagagtcactgcagtgttctaactgtaatgcaaatgtgcacaaaggttgtaaagat

SEQ ID NO: 8409 - DNA, 201 bp, Homo sapiens
attttaatatctccagggctgaatcccttcctctatcaagtaatctacagtcgaaggaatcactgctttctggagttcgctcacgttcttattcttgctcrtcacccaaaatttctttaggaaaaactcgtttggtgcgtgaattaacagtatgcagttcaagtgaagagcaaagagcttacagcttatcggagccaccaa

SEQ ID NO: 8410 - DNA, 201 bp, Homo sapiens
attcctagtggggatgaattggactcttttgagactaacactgaaccggattttaatatctccagggctgaatcccttcctctatcaagtaatctacagtygaaggaatcactgctttctggagttcgctcacgttcttattcttgctcatcacccaaaatttctttaggaaaaactcgtttggtgcgtgaattaacagta

SEQ ID NO: 8411 - DNA, 201 bp, Homo sapiens
ttgtaaaaatggctccagtatgacaaagtgcagttgtacgttgacatctcccccgggactgtggactggaaccacatctactttgaaagatttggacaccycccacactgagtccccaaccccccatgactcaaattcacaccgccctcaactgcaggcgtttataacagaagcaaagctaaatctaccgacaaggacaat

SEQ ID NO: 8412 - DNA, 201 bp, Homo sapiens
gcaatttggatttaaagagtggtattcacaaggggtgaactttcacagtcagggcagttgcctcagtgcccacataggcagaggaggatgtgggaaagggyttttctcagctagtttttgtgtgctcatttcttctgggagcattaaaagtggtgatctgttacagtcactattcaactgggcacgtgttgtgattggtca

SEQ ID NO: 8413 - DNA, 201 bp, Homo sapiens
atttttccaaacaaaacaaaacactggcacttttgggagaaactttttgtctccattccttatgtatgtgtgattgtctgtgtccaaattgctttaagaayaatatttaatatttcctggaagctcatttttttggcatgagtctaattaaattattgaaagccaccctgtttgtataatctttaacttatcaaatctaat

SEQ ID NO: 8414 - DNA, 201 bp, Homo sapiens
gatacagtccggacttgcttagtacctaagcctaatgctggtggggtttcaagacatggttcagcatcatcttttaacaaggcccagaggcccagagcccscatcaagtcattttgatgtaaatagtgaactttgttagagccctcacttctatcaatcagctgtcctgtccctgccagcacctggagcaccaactaccac

SEQ ID NO: 8415 - DNA, 201 bp, Homo sapiens
tcagaattttattaaggcaactccgaaatagtaatcttttggctcgacgccgaggaattccagaatgcattctgttggtcactcagcgtattacaaaataycctgtcttggtggaaaggatattgcagtacacaaaggaaagaactgaggaacataaagacttacgcaaagcgctttgcttaattaaagacatgattgcaa

SEQ ID NO: 8416 - DNA, 201 bp, Homo sapiens
ggagactgtgggacaggtccatccattgtccagaagtgttccaggcaccaccttggaaagcttcaggaggtcagccacatccttggagtctgagagtgacmataacagctgcagaagcaggtctcattctgatgagctgctacagtccatgggctcttctccctctacagagtctttcataatggaagatgttgtggattc

SEQ ID NO: 8417 - DNA, 201 bp, Homo sapiens
cttggctttacccaacgaagagggtgccacaccattagacttagctttacgtgaaggacactccaagctggtggaagacgtcacaaattttcagggcagayggtccccaagcttctcccgagtgcagctcagtgaagaagcctccttgcattacattcactcatcggaaacgctgaccctgaccctgaaccacacagccga

SEQ ID NO: 8418 - DNA, 201 bp, Homo sapiens
aaggtggaatgtagaaattttccaggttcttcacaatcagagattatacaagccatacagaatttaacccgtctcttatacagccttcaggccgccttgamcattcaggacagccacattgagatccacaggctggttctccagcagcaggagggcctgtctctcggccactctatcctccgaggcggccccttgcaggac

SEQ ID NO: 8419 - DNA, 201 bp, Homo sapiens
ctctccggtgaccatgggctctggctcagtgacctacgtggacaacatggcttgcaggctggctcgtctgctggtgacgcaggccaatcgcctcacagccygcagccaccagaccctgctgaccccatttgccttgacggcaggagcactgcctgccttggatgaggagctcgtgctggctctgacccatctggaattgcc

SEQ ID NO: 8420 - DNA, 201 bp, Homo sapiens
tcttgtgtctcccggggggagtccaggccttggctttacccaacgaagagggtgccacaccattagacttagctttacgtgaaggacactccaagctggtrgaagacgtcacaaattttcagggcagatggtccccaagcttctcccgagtgcagctcagtgaagaagcctccttgcattacattcactcatcggaaacgc

SEQ ID NO: 8421 - DNA, 201 bp, Homo sapiens
gcggcgctggctgcgcaggtgtgagcagcagcagcgggcgcaggcgaccagggagagctggctgcaggagcgggagcgggagtgccagtcgcaggaggagmtgctgctgcggagccggggcgagctggacctccagctccaggagtaccagcacagcctggagcggctgagggagggccagcgcctggtggagagggagca

SEQ ID NO: 8422 - DNA, 201 bp, Homo sapiens; identical to SEQ ID NO: 8397

SEQ ID NO: 8423 - DNA, 201 bp, Homo sapiens; identical to SEQ ID NO: 8412

SEQ ID NO: 8424 - DNA, 201 bp, Homo sapiens; identical to SEQ ID NO: 8413

SEQ ID NO: 8425 - DNA, 201 bp, Homo sapiens; identical to SEQ ID NO: 8398

SEQ ID NO: 8426 - DNA, 201 bp, Homo sapiens; identical to SEQ ID NO: 8414

SEQ ID NO: 8427 - DNA, 201 bp, Homo sapiens; identical to SEQ ID NO: 8401

SEQ ID NO: 8428 - DNA, 201 bp, Homo sapiens; identical to SEQ ID NO: 8403

SEQ ID NO: 8429 - DNA, 201 bp, Homo sapiens
agtttcagaattttattaagctccgaaatagtaatcttttggctcgacgccgaggaattccagaatgcattctgttggtcactcagcgtattacaaaataycctgtcttggtggaaaggatattgcagtacacaaaggaaagaactgaggaacataaagacttacgcaaagcgctttgcttaattaaagacatgattgcaa

SEQ ID NO: 8430 - DNA, 201 bp, Homo sapiens; identical to SEQ ID NO: 8418

SEQ ID NO: 8431 - DNA, 201 bp, Homo sapiens; identical to SEQ ID NO: 8405

SEQ ID NO: 8432 - DNA, 201 bp, Homo sapiens; identical to SEQ ID NO: 8407

SEQ ID NO: 8433 - DNA, 201 bp, Homo sapiens; identical to SEQ ID NO: 8421

SEQ ID NO: 8434 - DNA, 201 bp, Homo sapiens; identical to SEQ ID NO: 8411

SEQ ID NO: 8435 - DNA, 201 bp, Homo sapiens; identical to SEQ ID NO: 8397

SEQ ID NO: 8436 - DNA, 201 bp, Homo sapiens; identical to SEQ ID NO: 8412

SEQ ID NO: 8437 - DNA, 201 bp, Homo sapiens; identical to SEQ ID NO: 8413

SEQ ID NO: 8438 - DNA, 201 bp, Homo sapiens; identical to SEQ ID NO: 8414

SEQ ID NO: 8439 - DNA, 201 bp, Homo sapiens; identical to SEQ ID NO: 8401

SEQ ID NO: 8440 - DNA, 201 bp, Homo sapiens
aacatcaagtagacctcaaggtggacccttctcagccttcgaatgtcagtcacaaactgtggacagccgctggttccggccatcagatacttcctttccawgaaagcagcaaggattcttgtaaaaatgatttggacacctcccacactgagtccccaaccccccatgactcaaattcacaccgccctcaactgcaggcgt

SEQ ID NO: 8441 - DNA, 201 bp, Homo sapiens; identical to SEQ ID NO: 8429

SEQ ID NO: 8442 - DNA, 201 bp, Homo sapiens; identical to SEQ ID NO: 8418

SEQ ID NO: 8443 - DNA, 201 bp, Homo sapiens; identical to SEQ ID NO: 8405

SEQ ID NO: 8444 - DNA, 201 bp, Homo sapiens; identical to SEQ ID NO: 8407

SEQ ID NO: 8445 - DNA, 201 bp, Homo sapiens; identical to SEQ ID NO: 8421

SEQ ID NO: 8446 - DNA, 201 bp, Homo sapiens
gaatgtcagtcacaaactgtggacagccgctggttccggccatcagatacttcctttccatgaaagcagcaaggattcttgtaaaaatgatttggacaccycccacactgagtccccaaccccccatgactcaaattcacaccgccctcaactgcaggcgtttataacagaagcaaagctaaatctaccgacaaggacaat

SEQ ID NO: 8447 - DNA, 201 bp, Homo sapiens
gaatgatgagcactgcttgaagaaaaagcacgcattgtgttacacagcctcctgccaggacatgtcctgcagcaaacaaggagagtgcctcgagaccatcrggaactacacctgctcctgttaccctggattctatgggccagaatgtgaatacgtgagagagtgtggagaacttgagctccctcaacacgtgctcatgaa

SEQ ID NO: 8448 - DNA, 201 bp, Homo sapiens
ctcgatcgggacgctggacagactccccaccaatgtgtgaagccatcaagtgcccagaactctttgccccagagcagggcagcctggattgttctgacacycgtggagaattcaatgttggctccacctgccatttctcttgtgacaacggctttaagctggaggggcccaataatgtggaatgcacaacttctggaagat

SEQ ID NO: 8449 - DNA, 201 bp, Homo sapiens
atgttggctccacctgccatttctcttgtgacaacggctttaagctggaggggcccaataatgtggaatgcacaacttctggaagatggtcagctactccrccaacctgcaaaggcatagcatcacttcctactccaggggtgcaatgtccagccctcaccactcctgggcagggaaccatgtactgtaggcatcatccgg

SEQ ID NO: 8450 - DNA, 201 bp, Homo sapiens
taagctggaggggcccaataatgtggaatgcacaacttctggaagatggtcagctactccaccaacctgcaaaggcatagcatcacttcctactccagggktgcaatgtccagccctcaccactcctgggcagggaaccatgtactgtaggcatcatccgggaacctttggttttaataccacttgttactttggctgcaa

SEQ ID NO: 8451 - DNA, 201 bp, Homo sapiens
agtgcccagaactctttgccccagagcagggcagcctggattgttctgacactcgtggagaattcaatgttggctccacctgccatttctcttgtgacaayggctttaagctggaggggcccaataatgtggaatgcacaacttctggaagatggtcagctactccaccaacctgcaaaggcatagcatcacttcctactc

SEQ ID NO: 8452 - DNA, 201 bp, Homo sapiens
acctgcaaaggcatagcatcacttcctactccaggggtgcaatgtccagccctcaccactcctgggcagggaaccatgtactgtaggcatcatccgggaamctttggttttaataccacttgttactttggctgcaacgctggattcacactcataggagacagcactctcagctgcagaccttcaggacaatggacagca

SEQ ID NO: 8453 - DNA, 201 bp, Homo sapiens
catcaagtgcccagaactctttgccccagagcagggcagcctggattgttctgacactcgtggagaattcaatgttggctccacctgccatttctcttgtracaacggctttaagctggaggggcccaataatgtggaatgcacaacttctggaagatggtcagctactccaccaacctgcaaaggcatagcatcacttcc

SEQ ID NO: 8454 - DNA, 201 bp, Homo sapiens
aaacttcagttatggatcaatctgctctttccattgtctagagggccagttacttaatggctctgcacaaacagcatgccaagagaatggccactggtcamctaccgtgccaacctgccaagcaggaccattgactatccaggaagccctgacttactttggtggagcggtggcttctacgataggtctgataatgggtgg

SEQ ID NO: 8455 - DNA, 201 bp, Homo sapiens
gcctttaggtaccagtcagtctgcagcttcacctgcaatgaaggcttgctcctggtgggagcaagtgtgctacagtgcttggctactggaaactggaattytgttcctccagaatgccaagccattccctgcacacctttgctaagccctcagaatggaacaatgacctgtgttcaacctcttggaagttccagttataaa

SEQ ID NO: 8456 - DNA, 201 bp, Homo sapiens
gtgcaatgtccagccctcaccactcctgggcagggaaccatgtactgtaggcatcatccgggaacctttggttttaataccacttgttactttggctgcarcgctggattcacactcataggagacagcactctcagctgcagaccttcaggacaatggacagcagtaactccagcatgcagagctgtgaaatgctcagaa

SEQ ID NO: 8457 - DNA, 201 bp, Homo sapiens
aagctggaatgcttggcttctggaatctggacaaataagcctccacagtgtttagctgcccagtgcccacccctgaagattcctgaacgaggaaacatgayctgccttcattctgcaaaagcattccagcatcagtctagctgcagcttcagttgtgaagagggatttgcattagttggaccggaagtggtgcaatgcaca

SEQ ID NO: 8458 - DNA, 201 bp, Homo sapiens
ctttgcttcagtgccctgatctctgaactaacaaaccagaaagaagtggcagcatggacttatcattacagcacaaaagcatactcatggaatatttcccrtaaatactgccagaatcgctacacagacttagtggccatccagaataaaaatgaaattgattacctcaataaggtcctaccctactacagctcctactac

SEQ ID NO: 8459 - DNA, 201 bp, Homo sapiens
caatgtgtgaagccatcaagtgcccagaactctttgccccagagcagggcagcctggattgttctgacactcgtggagaattcaatgttggctccacctgycatttctcttgtgacaacggctttaagctggaggggcccaataatgtggaatgcacaacttctggaagatggtcagctactccaccaacctgcaaaggca

SEQ ID NO: 8460 - DNA, 201 bp, Homo sapiens
cctgctcctgttaccctggattctatgggccagaatgtgaatacgtgagagagtgtggagaacttgagctccctcaacacgtgctcatgaactgcagccaycctctgggaaacttctcttttaactcgcagtgcagcttccactgcactgacgggtaccaagtaaatgggcccagcaagctggaatgcttggcttctggaa

SEQ ID NO: 8461 - DNA, 201 bp, Homo sapiens
tgtttcctgagtttgggattgtggtacaatctcaaattctcaacctaccaccccttcctgtcccacctcttctcttcctgtaacacaagccacagaagccwggagcaaatgtttctgcagtagtctctgtgctttgactcacctgttacttgaaataccagtgaaccaaagagactggagcatctgactcacaagaagacc

SEQ ID NO: 8462 - DNA, 201 bp, Homo sapiens
caccaatgtgtgaagccatcaagtgcccagaactctttgccccagagcagggcagcctggattgttctgacactcgtggagaattcaatgttggctccacytgccatttctcttgtgacaacggctttaagctggaggggcccaataatgtggaatgcacaacttctggaagatggtcagctactccaccaacctgcaaag

SEQ ID NO: 8463 - DNA, 201 bp, Homo sapiens
tccctgcacacctttgctaagccctcagaatggaacaatgacctgtgttcaacctcttggaagttccagttataaatccacatgtcaattcatctgtgacragggatattctttgtctggaccagaaagattggattgtactcgatcgggacgctggacagactccccaccaatgtgtgaagccatcaagtgcccagaact

SEQ ID NO: 8464 - DNA, 201 bp, Homo sapiens
gccgatatagttcggtgtgataacttgggacagtggacagcaccagccccagtctgtcaagctttgcagtgccaggatctcccagttccaaatgaggcccrggtgaactgctcccaccccttcggtgcctttaggtaccagtcagtctgcagcttcacctgcaatgaaggcttgctcctggtgggagcaagtgtgctacag

SEQ ID NO: 8465 - DNA, 201 bp, Homo sapiens
tgccatttctcttgtgacaacggctttaagctggaggggcccaataatgtggaatgcacaacttctggaagatggtcagctactccaccaacctgcaaagkcatagcatcacttcctactccaggggtgcaatgtccagccctcaccactcctgggcagggaaccatgtactgtaggcatcatccgggaacctttggtttt

SEQ ID NO: 8466 - DNA, 201 bp, Homo sapiens
ttctgacactcgtggagaattcaatgttggctccacctgccatttctcttgtgacaacggctttaagctggaggggcccaataatgtggaatgcacaactkctggaagatggtcagctactccaccaacctgcaaaggcatagcatcacttcctactccaggggtgcaatgtccagccctcaccactcctgggcagggaac

SEQ ID NO: 8467 - DNA, 201 bp, Homo sapiens
caacctgcaaaggcatagcatcacttcctactccaggggtgcaatgtccagccctcaccactcctgggcagggaaccatgtactgtaggcatcatccgggracctttggttttaataccacttgttactttggctgcaacgctggattcacactcataggagacagcactctcagctgcagaccttcaggacaatggacag

SEQ ID NO: 8468 - DNA, 201 bp, Homo sapiens
cctgaacgaggaaacatgacctgccttcattctgcaaaagcattccagcatcagtctagctgcagcttcagttgtgaagagggatttgcattagttggacyggaagtggtgcaatgcacagcctcgggggtatggacagccccagccccagtgtgtaaagctatttcgtgtgagccgctggagagtcctgtccacggaagc

SEQ ID NO: 8469 - DNA, 201 bp, Homo sapiens
cgagaccatcgggaactacacctgctcctgttaccctggattctatgggccagaatgtgaatacgtgagagagtgtggagaacttgagctccctcaacacrtgctcatgaactgcagccaccctctgggaaacttctcttttaactcgcagtgcagcttccactgcactgacgggtaccaagtaaatgggcccagcaagct

SEQ ID NO: 8470 - DNA, 201 bp, Homo sapiens
gtctagagggccagttacttaatggctctgcacaaacagcatgccaagagaatggccactggtcaactaccgtgccaacctgccaagcaggaccattgacyatccaggaagccctgacttactttggtggagcggtggcttctacgataggtctgataatgggtgggacgctcctggctttgctaagaaagcgtttcagac

SEQ ID NO: 8471 - DNA, 201 bp, Homo sapiens
ttcagttgtgaagagggatttgcattagttggaccggaagtggtgcaatgcacagcctcgggggtatggacagccccagccccagtgtgtaaagctatttygtgtgagccgctggagagtcctgtccacggaagcatggattgctctccatccttgagagcgtttcagtatgacaccaactgtagcttccgctgtgctgaa

SEQ ID NO: 8472 - DNA, 138 bp, Homo sapiens
gatggcaccagaggctgcagaaggccaagaatcaagctagaaggccacatgtcaccgtggaccttcctgccaccagtcactgtccctcaaatgacccaaasaccaatattcaaatgcgtaattaaaagaattttcccc

SEQ ID NO: 8473 - DNA, 201 bp, Homo sapiens
ccaaaaaggctctcaccaacgaggctgagaactgggctgataatgaacctaacaacaaaaggaacaacgaggactgcgtggagatatacatcaagagtccrtcagcccctggcaagtggaatgatgagcactgcttgaagaaaaagcacgcattgtgttacacagcctcctgccaggacatgtcctgcagcaaacaaggag

SEQ ID NO: 8474 - DNA, 201 bp, Homo sapiens
aagagaatggccactggtcaactaccgtgccaacctgccaagcaggaccattgactatccaggaagccctgacttactttggtggagcggtggcttctacrataggtctgataatgggtgggacgctcctggctttgctaagaaagcgtttcagacaaaaagatgatgggaaatgccccttgaatcctcacagccacctag

SEQ ID NO: 8475 - DNA, 201 bp, Homo sapiens
gtgagagagtgtggagaacttgagctccctcaacacgtgctcatgaactgcagccaccctctgggaaacttctcttttaactcgcagtgcagcttccactkcactgacgggtaccaagtaaatgggcccagcaagctggaatgcttggcttctggaatctggacaaataagcctccacagtgtttagctgcccagtgccca

SEQ ID NO: 8476 - DNA, 201 bp, Homo sapiens; identical to SEQ ID NO: 8447

SEQ ID NO: 8477 - DNA, 201 bp, Homo sapiens; identical to SEQ ID NO: 8448

SEQ ID NO: 8478 - DNA, 201 bp, Homo sapiens; identical to SEQ ID NO: 8449

SEQ ID NO: 8479 - DNA, 201 bp, Homo sapiens; identical to SEQ ID NO: 8450

SEQ ID NO: 8480 - DNA, 201 bp, Homo sapiens; identical to SEQ ID NO: 8451

SEQ ID NO: 8481 - DNA, 201 bp, Homo sapiens; identical to SEQ ID NO: 8452

SEQ ID NO: 8482 - DNA, 201 bp, Homo sapiens; identical to SEQ ID NO: 8453

SEQ ID NO: 8483 - DNA, 201 bp, Homo sapiens
aaacttcagttatggatcaatctgctctttccattgtctagagggccagttacttaatggctctgcacaaacagcatgccaagagaatggccactggtcamctaccgtgccaacctgccaagatgatgggaaatgccccttgaatcctcacagccacctaggaacatatggagtttttacaaacgctgcatttgacccgag

SEQ ID NO: 8484 - DNA, 201 bp, Homo sapiens; identical to SEQ ID NO: 8455

SEQ ID NO: 8485 - DNA, 201 bp, Homo sapiens; identical to SEQ ID NO: 8456

SEQ ID NO: 8486 - DNA, 201 bp, Homo sapiens
tgaaggaaccatggactgtgttcatccgctcactgcttttgcctatggctccagctgtaaatttgagtgccagcccggctacagagtgaggggcttggacrtgctccgctgcattgactctggacactggtctgcacccttgccaacctgtgaggctatttcgtgtgagccgctggagagtcctgtccacggaagcatgga

SEQ ID NO: 8487 - DNA, 201 bp, Homo sapiens
ttagttggaccggaagtggtgcaatgcacagcctcgggggtatggacagccccagccccagtgtgtaaagctgtgcagtgtcagcacctggaagcccccartgaaggaaccatggactgtgttcatccgctcactgcttttgcctatggctccagctgtaaatttgagtgccagcccggctacagagtgaggggcttggac

SEQ ID NO: 8488 - DNA, 201 bp, Homo sapiens; identical to SEQ ID NO: 8457

SEQ ID NO: 8489 - DNA, 201 bp, Homo sapiens; identical to SEQ ID NO: 8458

SEQ ID NO: 8490 - DNA, 201 bp, Homo sapiens; identical to SEQ ID NO: 8459

SEQ ID NO: 8491 - DNA, 201 bp, Homo sapiens; identical to SEQ ID NO: 8460

SEQ ID NO: 8492 - DNA, 201 bp, Homo sapiens; identical to SEQ ID NO: 8461

SEQ ID NO: 8493 - DNA, 201 bp, Homo sapiens; identical to SEQ ID NO: 8462

SEQ ID NO: 8494 - DNA, 201 bp, Homo sapiens; identical to SEQ ID NO: 8463

SEQ ID NO: 8495 - DNA, 201 bp, Homo sapiens; identical to SEQ ID NO: 8464

SEQ ID NO: 8496 - DNA, 201 bp, Homo sapiens; identical to SEQ ID NO: 8465

SEQ ID NO: 8497 - DNA, 201 bp, Homo sapiens; identical to SEQ ID NO: 8466

SEQ ID NO: 8498 - DNA, 201 bp, Homo sapiens; identical to SEQ ID NO: 8467

SEQ ID NO: 8499 - DNA, 201 bp, Homo sapiens
cctgaacgaggaaacatgacctgccttcattctgcaaaagcattccagcatcagtctagctgcagcttcagttgtgaagagggatttgcattagttggacyggaagtggtgcaatgcacagcctcgggggtatggacagccccagccccagtgtgtaaagctgtgcagtgtcagcacctggaagcccccagtgaaggaacc

SEQ ID NO: 8500 - DNA, 201 bp, Homo sapiens; identical to SEQ ID NO: 8469

SEQ ID NO: 8501 - DNA, 201 bp, Homo sapiens
tttgagtgccagcccggctacagagtgaggggcttggacatgctccgctgcattgactctggacactggtctgcacccttgccaacctgtgaggctatttygtgtgagccgctggagagtcctgtccacggaagcatggattgctctccatccttgagagcgtttcagtatgacaccaactgtagcttccgctgtgctgaa

SEQ ID NO: 8502 - DNA, 138 bp, Homo sapiens; identical to SEQ ID NO: 8472

SEQ ID NO: 8503 - DNA, 201 bp, Homo sapiens; identical to SEQ ID NO: 8473

SEQ ID NO: 8504 - DNA, 201 bp, Homo sapiens; identical to SEQ ID NO: 8475

SEQ ID NO: 8505 - DNA, 201 bp, Homo sapiens; identical to SEQ ID NO: 8447

SEQ ID NO: 8506 - DNA, 201 bp, Homo sapiens; identical to SEQ ID NO: 8448

SEQ ID NO: 8507 - DNA, 201 bp, Homo sapiens; identical to SEQ ID NO: 8449

SEQ ID NO: 8508 - DNA, 201 bp, Homo sapiens; identical to SEQ ID NO: 8450

SEQ ID NO: 8509 - DNA, 201 bp, Homo sapiens; identical to SEQ ID NO: 8451

SEQ ID NO: 8510 - DNA, 201 bp, Homo sapiens; identical to SEQ ID NO: 8452

SEQ ID NO: 8511 - DNA, 201 bp, Homo sapiens; identical to SEQ ID NO: 8453

SEQ ID NO: 8512 - DNA, 201 bp, Homo sapiens; identical to SEQ ID NO: 8454

SEQ ID NO: 8513 - DNA, 201 bp, Homo sapiens; identical to SEQ ID NO: 8455

SEQ ID NO: 8514 - DNA, 201 bp, Homo sapiens; identical to SEQ ID NO: 8456

SEQ ID NO: 8515 - DNA, 201 bp, Homo sapiens; identical to SEQ ID NO: 8486

SEQ ID NO: 8516 - DNA, 201 bp, Homo sapiens; identical to SEQ ID NO: 8487

SEQ ID NO: 8517 - DNA, 201 bp, Homo sapiens; identical to SEQ ID NO: 8457

SEQ ID NO: 8518 - DNA, 201 bp, Homo sapiens; identical to SEQ ID NO: 8458

SEQ ID NO: 8519 - DNA, 201 bp, Homo sapiens; identical to SEQ ID NO: 8459

SEQ ID NO: 8520 - DNA, 201 bp, Homo sapiens; identical to SEQ ID NO: 8460

SEQ ID NO: 8521 - DNA, 201 bp, Homo sapiens; identical to SEQ ID NO: 8461

SEQ ID NO: 8522 - DNA, 201 bp, Homo sapiens; identical to SEQ ID NO: 8462

SEQ ID NO: 8523 - DNA, 201 bp, Homo sapiens; identical to SEQ ID NO: 8463

SEQ ID NO: 8524 - DNA, 201 bp, Homo sapiens; identical to SEQ ID NO: 8464

SEQ ID NO: 8525 - DNA, 201 bp, Homo sapiens; identical to SEQ ID NO: 8465

SEQ ID NO: 8526 - DNA, 201 bp, Homo sapiens; identical to SEQ ID NO: 8466

SEQ ID NO: 8527 - DNA, 201 bp, Homo sapiens; identical to SEQ ID NO: 8467

SEQ ID NO: 8528 - DNA, 201 bp, Homo sapiens; identical to SEQ ID NO: 8499

SEQ ID NO: 8529 - DNA, 201 bp, Homo sapiens; identical to SEQ ID NO: 8469

SEQ ID NO: 8530 - DNA, 201 bp, Homo sapiens; identical to SEQ ID NO: 8470

SEQ ID NO: 8531 - DNA, 201 bp, Homo sapiens; identical to SEQ ID NO: 8501

SEQ ID NO: 8532 - DNA, 138 bp, Homo sapiens; identical to SEQ ID NO: 8472

SEQ ID NO: 8533 - DNA, 201 bp, Homo sapiens; identical to SEQ ID NO: 8473

SEQ ID NO: 8534 - DNA, 201 bp, Homo sapiens; identical to SEQ ID NO: 8474

SEQ ID NO: 8535 - DNA, 201 bp, Homo sapiens; identical to SEQ ID NO: 8475

SEQ ID NO: 8536 - DNA, 201 bp, Homo sapiens; identical to SEQ ID NO: 8447

SEQ ID NO: 8537 - DNA, 201 bp, Homo sapiens; identical to SEQ ID NO: 8448

SEQ ID NO: 8538 - DNA, 201 bp, Homo sapiens; identical to SEQ ID NO: 8449

SEQ ID NO: 8539 - DNA, 201 bp, Homo sapiens; identical to SEQ ID NO: 8450

SEQ ID NO: 8540 - DNA, 201 bp, Homo sapiens; identical to SEQ ID NO: 8451

SEQ ID NO: 8541 - DNA, 201 bp, Homo sapiens; identical to SEQ ID NO: 8452

SEQ ID NO: 8542 - DNA, 201 bp, Homo sapiens; identical to SEQ ID NO: 8453

SEQ ID NO: 8543 - DNA, 201 bp, Homo sapiens; identical to SEQ ID NO: 8454

SEQ ID NO: 8544 - DNA, 201 bp, Homo sapiens; identical to SEQ ID NO: 8455

SEQ ID NO: 8545 - DNA, 201 bp, Homo sapiens; identical to SEQ ID NO: 8456

SEQ ID NO: 8546 - DNA, 201 bp, Homo sapiens; identical to SEQ ID NO: 8486

SEQ ID NO: 8547 - DNA, 201 bp, Homo sapiens; identical to SEQ ID NO: 8487

SEQ ID NO: 8548 - DNA, 201 bp, Homo sapiens; identical to SEQ ID NO: 8457

SEQ ID NO: 8549 - DNA, 201 bp, Homo sapiens; identical to SEQ ID NO: 8458

SEQ ID NO: 8550 - DNA, 201 bp, Homo sapiens; identical to SEQ ID NO: 8459

SEQ ID NO: 8551 - DNA, 201 bp, Homo sapiens; identical to SEQ ID NO: 8460

SEQ ID NO: 8552 - DNA, 201 bp, Homo sapiens; identical to SEQ ID NO: 8461

SEQ ID NO: 8553 - DNA, 201 bp, Homo sapiens; identical to SEQ ID NO: 8462

SEQ ID NO: 8554 - DNA, 201 bp, Homo sapiens; identical to SEQ ID NO: 8463

SEQ ID NO: 8555 - DNA, 201 bp, Homo sapiens; identical to SEQ ID NO: 8464

SEQ ID NO: 8556 - DNA, 201 bp, Homo sapiens; identical to SEQ ID NO: 8465

SEQ ID NO: 8557 - DNA, 201 bp, Homo sapiens; identical to SEQ ID NO: 8466

SEQ ID NO: 8558 - DNA, 201 bp, Homo sapiens; identical to SEQ ID NO: 8467

SEQ ID NO: 8559 - DNA, 201 bp, Homo sapiens; identical to SEQ ID NO: 8499

SEQ ID NO: 8560 - DNA, 201 bp, Homo sapiens; identical to SEQ ID NO: 8469

SEQ ID NO: 8561 - DNA, 201 bp, Homo sapiens; identical to SEQ ID NO: 8470

SEQ ID NO: 8562 - DNA, 201 bp, Homo sapiens; identical to SEQ ID NO: 8501

SEQ ID NO: 8563 - DNA, 138 bp, Homo sapiens; identical to SEQ ID NO: 8472

SEQ ID NO: 8564 - DNA, 201 bp, Homo sapiens; identical to SEQ ID NO: 8473

SEQ ID NO: 8565 - DNA, 201 bp, Homo sapiens; identical to SEQ ID NO: 8474

SEQ ID NO: 8566 - DNA, 201 bp, Homo sapiens; identical to SEQ ID NO: 8475

SEQ ID NO: 8567 - DNA, 201 bp, Homo sapiens
ggcccagagggaaagtggatcatatcttctctcaccccaaaacatttgcaagctgggatgcaggcttacattgacattaaaaactgcccaaagaaaaccasgaatcttaagaaaataactcgtgagcagaggcggcacatgaagaggtgggaatacttcattgctgcagaggaagtcatttgggactatgcacctgtaata

SEQ ID NO: 8568 - DNA, 201 bp, Homo sapiens
actctcaatgatacttttctatcaaaggaatttaatccactggttatagtgggcctcagtaaagatggtacagattacattgagatcattccaaaggaagmggtccagagcagtgaagatgactatgctgaaattgattatgtgccctatgatgacccctacaaaactgatgttaggacaaacatcaactcctccagagat

SEQ ID NO: 8569 - DNA, 123 bp, Homo sapiens
gaaaaagcggagggagtgagagycagaggctgctgctgccgtttgcaagaactgcaggggaggaggacgctgccacccacagcctctagagctcattgcagctgggacagcccggagtgtggt

SEQ ID NO: 8570 - DNA, 201 bp, Homo sapiens
gacctgagcccacaaactcaagtttgaatctttctgtaacttcctttaagaaaattgtctacagagagtatgaaccatattttaagaaagaaaaaccacartctaccatttcaggacttcttgggcctactttatatgctgaagtcggagacatcataaaagttcactttaaaaataaggcagataagcccttgagcatcc

SEQ ID NO: 8571 - DNA, 201 bp, Homo sapiens
tcagagacacactcaaaatcgtgttcaaaaatatggccagccgcccctatagcatttaccctcatggagtgaccttctcgccttatgaagatgaagtcaaytcttctttcacctcaggcaggaacaacaccatgatcagagcagttcaaccaggggaaacctatacttataagtggaacatcttagagtttgatgaaccca

SEQ ID NO: 8572 - DNA, 201 bp, Homo sapiens
cattaatgggatgatctacagcttgcctggcctgaaaatgtatgagcaagagtgggtgaggttacacctgctgaacataggcggctcccaagacattcacrtggttcactttcacggccagaccttgctggaaaatggcaataaacagcaccagttaggggtctggccccttctgcctggttcatttaaaactcttgaaat

SEQ ID NO: 8573 - DNA, 201 bp, Homo sapiens
tggctgcagcattaggaatcaggtcattccgaaactcatcattgaatcaggaagaagaagagttcaatcttactgccctagctctggagaatggcactgarttcgtttcttcaaacacagatataattgttggttcaaattattcttccccaagtaatattagtaagttcactgtcaataaccttgcagaacctcagaaag

SEQ ID NO: 8574 - DNA, 201 bp, Homo sapiens
caggaacaacaccatgatcagagcagttcaaccaggggaaacctatacttataagtggaacatcttagagtttgatgaacccacagaaaatgatgcccagkgcttaacaagaccatactacagtgacgtggacatcatgagagacatcgcctctgggctaataggactacttctaatctgtaagagcagatccctggacag

SEQ ID NO: 8575 - DNA, 201 bp, Homo sapiens
taagaaagaaaaaccacaatctaccatttcaggacttcttgggcctactttatatgctgaagtcggagacatcataaaagttcactttaaaaataaggcasataagcccttgagcatccatcctcaaggaattaggtacagtaaattatcagaaggtgcttcttaccttgaccacacattccctgcggagaagatggacga

SEQ ID NO: 8576 - DNA, 201 bp, Homo sapiens
gttttatgaatcaaacatcatgagcactatcaatggctatgtgcctgagagcataactactcttggattctgctttgatgacactgtccagtggcacttcygtagtgtggggacccagaatgaaattttgaccatccacttcactgggcactcattcatctatggaaagaggcatgaggacaccttgaccctcttccccat

SEQ ID NO: 8577 - DNA, 201 bp, Homo sapiens
tacaactctttctctagacctcagccagacaaacctctctccagaactcagtcagacaaacctttccccagacctcagtgagatgcccctctttgcagatytcagtcaaattccccttaccccagacctcgaccagatgacactttctccagaccttggtgagacagatctttccccaaactttggtcagatgtccctttc

SEQ ID NO: 8578 - DNA, 201 bp, Homo sapiens
ctgatcaaatgcactctacttcagaccccagtcacagatcctcttctccagagctcagtgaaatgcttgagtatgaccgaagtcacaagtccttccccacmgatataagtcaaatgtccccttcctcagaacatgaagtctggcagacagtcatctctccagacctcagccaggtgaccctctctccagaactcagccaga

SEQ ID NO: 8579 - DNA, 201 bp, Homo sapiens
ctactcagctgtgaacccagaaaaagatattcactcaggcttgataggtcccctcctaatctgccaaaaaggaatactacataaggacagcaacatgcctrtggacatgagagaatttgtcttactatttatgacctttgatgaaaagaagagctggtactatgaaaagaagtcccgaagttcttggagactcacatcctc

SEQ ID NO: 8580 - DNA, 201 bp, Homo sapiens
acccctgggtatggaaaatggaaagatagaaaacaagcaaatcacagcttcttcgtttaagaaatcttggtggggagattactgggaacccttccgtgccygtctgaatgcccagggacgtgtgaatgcctggcaagccaaggcaaacaacaataagcagtggctagaaattgatctactcaagatcaagaagataacggc

SEQ ID NO: 8581 - DNA, 201 bp, Homo sapiens
aagaagagttcaatcttactgccctagctctggagaatggcactgaattcgtttcttcaaacacagatataattgttggttcaaattattcttccccaagkaatattagtaagttcactgtcaataaccttgcagaacctcagaaagccccttctcaccaacaagccaccacagctggttccccactgagacacctcattg

SEQ ID NO: 8582 - DNA, 201 bp, Homo sapiens
caaccctttctctagacttcagccagacaaacctctctccagaactcagccatatgactctctctccagaactcagtcagacaaacctttccccagccctyggtcagatgcccatttctccagacctcagccatacaaccctttctctagacttcagccagacaaacctctctccagaactcagtcaaacaaacctttccc

SEQ ID NO: 8583 - DNA, 201 bp, Homo sapiens
ctctctccagaactcagccatatgactctctctccagaactcagtcagacaaacctttccccagccctcggtcagatgcccatttctccagacctcagccrtacaaccctttctctagacttcagccagacaaacctctctccagaactcagtcaaacaaacctttccccagccctcggtcagatgcccctttctccagac

SEQ ID NO: 8584 - DNA, 201 bp, Homo sapiens
agtcccgaagttcttggagactcacatcctcagaaatgaaaaaatcccatgagtttcacgccattaatgggatgatctacagcttgcctggcctgaaaatrtatgagcaagagtgggtgaggttacacctgctgaacataggcggctcccaagacattcacgtggttcactttcacggccagaccttgctggaaaatggca

SEQ ID NO: 8585 - DNA, 201 bp, Homo sapiens
aaggcaaacaacaataagcagtggctagaaattgatctactcaagatcaagaagataacggcaattataacacagggctgcaagtctctgtcctctgaaaygtatgtaaagagctataccatccactacagtgagcagggagtggaatggaaaccatacaggctgaaatcctccatggtggacaagatttttgaaggaaat

SEQ ID NO: 8586 - DNA, 201 bp, Homo sapiens
ataatttctcaaaccaaattggaaaacattataagaaagttatgtacacacagtacgaagatgagtccttcaccaaacatacagtgaatcccaatatgaargaagatgggattttgggtcctattatcagagcccaggtcagagacacactcaaaatcgtgttcaaaaatatggccagccgcccctatagcatttaccctc

SEQ ID NO: 8587 - DNA, 201 bp, Homo sapiens
ttggataatttctcaaaccaaattggaaaacattataagaaagttatgtacacacagtacgaagatgagtccttcaccaaacatacagtgaatcccaataygaaagaagatgggattttgggtcctattatcagagcccaggtcagagacacactcaaaatcgtgttcaaaaatatggccagccgcccctatagcatttac

SEQ ID NO: 8588 - DNA, 201 bp, Homo sapiens
cagccagacaaacctctctccagaactcagtcagacaaacctttccccagacctcagtgagatgcccctctttgcagatctcagtcaaattccccttaccycagacctcgaccagatgacactttctccagaccttggtgagacagatctttccccaaactttggtcagatgtccctttccccagacctcagccaggtgac

SEQ ID NO: 8589 - DNA, 201 bp, Homo sapiens
gtttagaacctgaagatgaagagagtgatgctgactatgattaccagaacagactggctgcagcattaggaatcaggtcattccgaaactcatcattgaaycaggaagaagaagagttcaatcttactgccctagctctggagaatggcactgaattcgtttcttcaaacacagatataattgttggttcaaattattctt

SEQ ID NO: 8590 - DNA, 201 bp, Homo sapiens
gtcctccaggtctttatcagacagtgcccccagaggaacactatcaaacattccccattcaagaccctgatcaaatgcactctacttcagaccccagtcasagatcctcttctccagagctcagtgaaatgcttgagtatgaccgaagtcacaagtccttccccacagatataagtcaaatgtccccttcctcagaacatg

SEQ ID NO: 8591 - DNA, 201 bp, Homo sapiens
tcatggctacacggaaaatgcatgatcgtttagaacctgaagatgaagagagtgatgctgactatgattaccagaacagactggctgcagcattaggaatyaggtcattccgaaactcatcattgaatcaggaagaagaagagttcaatcttactgccctagctctggagaatggcactgaattcgtttcttcaaacacag

SEQ ID NO: 8592 - DNA, 201 bp, Homo sapiens
gaagtgaagcctacaacacattttcagaaagaagacttaagcattcgttggtgcttcataaatccaatgaaacatctcttcccacagacctcaatcagacrttgccctctatggattttggctggatagcctcacttcctgaccataatcagaattcctcaaatgacactggtcaggcaagctgtcctccaggtctttatc

SEQ ID NO: 8593 - DNA, 201 bp, Homo sapiens
aaattattcttccccaagtaatattagtaagttcactgtcaataaccttgcagaacctcagaaagccccttctcaccaacaagccaccacagctggttccycactgagacacctcattggcaagaactcagttctcaattcttccacagcagagcattccagcccatattctgaagaccctatagaggatcctctacagcc

SEQ ID NO: 8594 - DNA, 201 bp, Homo sapiens
agtggcacttctgtagtgtggggacccagaatgaaattttgaccatccacttcactgggcactcattcatctatggaaagaggcatgaggacaccttgacmctcttccccatgcgtggagaatctgtgacggtcacaatggataatgttggaacttggatgttaacttccatgaattctagtccaagaagcaaaaagctga

SEQ ID NO: 8595 - DNA, 201 bp, Homo sapiens
aatggagtatcagtgaggacagtggacccacccatgatgaccctccatgcctcacacacatctattactcccatgaaaatctgatcgaggatttcaactckgggctgattgggcccctgcttatctgtaaaaaagggaccctaactgagggtgggacacagaagacgtttgacaagcaaatcgtgctactatttgctgtgt

SEQ ID NO: 8596 - DNA, 201 bp, Homo sapiens
cagcagacatcgaacagcaggctgtgtttgctgtgtttgatgagaacaaaagctggtaccttgaggacaacatcaacaagttttgtgaaaatcctgatgargtgaaacgtgatgaccccaagttttatgaatcaaacatcatgagcactatcaatggctatgtgcctgagagcataactactcttggattctgctttgatg

SEQ ID NO: 8597 - DNA, 201 bp, Homo sapiens
ttaaaaataaggcagataagcccttgagcatccatcctcaaggaattaggtacagtaaattatcagaaggtgcttcttaccttgaccacacattccctgcrgagaagatggacgacgctgtggctccaggccgagaatacacctatgaatggagtatcagtgaggacagtggacccacccatgatgaccctccatgcctca

SEQ ID NO: 8598 - DNA, 201 bp, Homo sapiens
gtgaggacagtggacccacccatgatgaccctccatgcctcacacacatctattactcccatgaaaatctgatcgaggatttcaactcggggctgattggscccctgcttatctgtaaaaaagggaccctaactgagggtgggacacagaagacgtttgacaagcaaatcgtgctactatttgctgtgtttgatgaaagca

SEQ ID NO: 8599 - DNA, 201 bp, Homo sapiens
caaagtaactcatctaagattttggttgggagatggcatttggcttctgagaaaggtagctatgaaataatccaagatactgatgaagacacagctgttarcaattggctgatcagcccccagaatgcctcacgtgcttggggagaaagcacccctcttgccaacaagcctggaaagcagagtggccacccaaagtttcct

SEQ ID NO: 8600 - DNA, 201 bp, Homo sapiens
atgggacaatgccagatataacagtttgtgcccatgaccacatcagctggcatctgctgggaatgagctcggggccagaattattctccattcatttcaayggccaggtcctggagcagaaccatcataaggtctcagccatcacccttgtcagtgctacatccactaccgcaaatatgactgtgggcccagagggaaagt

SEQ ID NO: 8601 - DNA, 201 bp, Homo sapiens
aagaactttttcaaccccccaatcatttccaggtttatccgtgtcattcctaaaacatggaatcaaagtattgcacttcgcctggaactctttggctgtgrtatttactagaattgaacattcaaaaacccctggaagagactctttaagacctcaaaccatttagaatgggcaatgtattttacgctgtgttaaatgtta

SEQ ID NO: 8602 - DNA, 201 bp, Homo sapiens
ctggagccagtcatcatccctaatgtacacagtcaatggatatgtgaatgggacaatgccagatataacagtttgtgcccatgaccacatcagctggcatytgctgggaatgagctcggggccagaattattctccattcatttcaacggccaggtcctggagcagaaccatcataaggtctcagccatcacccttgtcag

SEQ ID NO: 8603 - DNA, 201 bp, Homo sapiens
cggcaagcgctgcccaggtcctggggtggtggcagccagcgggagcaggaaaggaagcatgttcccaggctgcccacgcctctgggtcctggtggtcttgrgcaccagctgggtaggctgggggagccaagggacagaagcggcacagctaaggcagttctacgtggctgctcagggcatcagttggagctaccgacctga

SEQ ID NO: 8604 - DNA, 201 bp, Homo sapiens
tgggtatggaaaatggaaagatagaaaacaagcaaatcacagcttcttcgtttaagaaatcttggtggggagattactgggaacccttccgtgcccgtctraatgcccagggacgtgtgaatgcctggcaagccaaggcaaacaacaataagcagtggctagaaattgatctactcaagatcaagaagataacggcaatta

SEQ ID NO: 8605 - DNA, 201 bp, Homo sapiens
gataatgctgttcagccaaatagcagttatacctacgtatggcatgccactgagcgatcagggccagaaagtcctggctctgcctgtcgggcttgggcctrctactcagctgtgaacccagaaaaagatattcactcaggcttgataggtcccctcctaatctgccaaaaaggaatactacataaggacagcaacatgcct

SEQ ID NO: 8606 - DNA, 201 bp, Homo sapiens
gctgtgtttgatgaaagcaagagctggagccagtcatcatccctaatgtacacagtcaatggatatgtgaatgggacaatgccagatataacagtttgtgyccatgaccacatcagctggcatctgctgggaatgagctcggggccagaattattctccattcatttcaacggccaggtcctggagcagaaccatcataag

SEQ ID NO: 8607 - DNA, 201 bp, Homo sapiens
tggcatttggcttctgagaaaggtagctatgaaataatccaagatactgatgaagacacagctgttaacaattggctgatcagcccccagaatgcctcacktgcttggggagaaagcacccctcttgccaacaagcctggaaagcagagtggccacccaaagtttcctagagttagacataaatctctacaagtaagacag

SEQ ID NO: 8608 - DNA, 201 bp, Homo sapiens
ctgtccagtggcacttctgtagtgtggggacccagaatgaaattttgaccatccacttcactgggcactcattcatctatggaaagaggcatgaggacacyttgaccctcttccccatgcgtggagaatctgtgacggtcacaatggataatgttggaacttggatgttaacttccatgaattctagtccaagaagcaaaa

SEQ ID NO: 8609 - DNA, 201 bp, Homo sapiens
tcagccatacaaccctttctccagacctcagccatacaaccctttctttagacctcagccagacaaacctctctccagaactcagtcagacaaacctttcyccagccctcggtcagatgcccctttctccagacctcagccatacaaccctttctctagacttcagccagacaaacctctctccagaactcagccatatga

SEQ ID NO: 8610 - DNA, 201 bp, Homo sapiens
gggcccagagggaaagtggatcatatcttctctcaccccaaaacatttgcaagctgggatgcaggcttacattgacattaaaaactgcccaaagaaaaccrggaatcttaagaaaataactcgtgagcagaggcggcacatgaagaggtgggaatacttcattgctgcagaggaagtcatttgggactatgcacctgtaat

SEQ ID NO: 8611 - DNA, 201 bp, Homo sapiens
gagacacctaagccaagacactggttctccttccggaatgaggccctgggaggaccttcctagccaagacactggttctccttccagaatgaggccctggraggaccctcctagtgatctgttactcttaaaacaaagtaactcatctaagattttggttgggagatggcatttggcttctgagaaaggtagctatgaaat

SEQ ID NO: 8612 - DNA, 201 bp, Homo sapiens
tctgaagaccctatagaggatcctctacagccagatgtcacagggatacgtctactttcacttggtgctggagaattcaaaagtcaagaacatgctaagcrtaagggacccaaggtagaaagagatcaagcagcaaagcacaggttctcctggatgaaattactagcacataaagttgggagacacctaagccaagacact

SEQ ID NO: 8613 - DNA, 201 bp, Homo sapiens
agacctcagccagacaaacctctctccagaactcagtcagacaaacctttctccagccctcggtcagatgcccctttctccagacctcagccatacaaccmtttctctagacttcagccagacaaacctctctccagaactcagccatatgactctctctccagaactcagtcagacaaacctttccccagccctcggtca

SEQ ID NO: 8614 - DNA, 201 bp, Homo sapiens
ttaacaagaccatactacagtgacgtggacatcatgagagacatcgcctctgggctaataggactacttctaatctgtaagagcagatccctggacaggcraggaatacagagggcagcagacatcgaacagcaggctgtgtttgctgtgtttgatgagaacaaaagctggtaccttgaggacaacatcaacaagttttgt

SEQ ID NO: 8615 - DNA, 201 bp, Homo sapiens
atcagggccagaaagtcctggctctgcctgtcgggcttgggcctactactcagctgtgaacccagaaaaagatattcactcaggcttgataggtcccctcstaatctgccaaaaaggaatactacataaggacagcaacatgcctatggacatgagagaatttgtcttactatttatgacctttgatgaaaagaagagctg

SEQ ID NO: 8616 - DNA, 201 bp, Homo sapiens
gaagtcacaagtccttccccacagatataagtcaaatgtccccttcctcagaacatgaagtctggcagacagtcatctctccagacctcagccaggtgacyctctctccagaactcagccagacaaacctctctccagacctcagccacacgactctctctccagaactcattcagagaaacctttccccagccctcggtc

SEQ ID NO: 8617 - DNA, 201 bp, Homo sapiens
gcagagcattccagcccatattctgaagaccctatagaggatcctctacagccagatgtcacagggatacgtctactttcacttggtgctggagaattcaraagtcaagaacatgctaagcataagggacccaaggtagaaagagatcaagcagcaaagcacaggttctcctggatgaaattactagcacataaagttggg

SEQ ID NO: 8618 - DNA, 201 bp, Homo sapiens
agtaagttcactgtcaataaccttgcagaacctcagaaagccccttctcaccaacaagccaccacagctggttccccactgagacacctcattggcaagamctcagttctcaattcttccacagcagagcattccagcccatattctgaagaccctatagaggatcctctacagccagatgtcacagggatacgtctactt

SEQ ID NO: 8619 - DNA, 201 bp, Homo sapiens
acctatacttataagtggaacatcttagagtttgatgaacccacagaaaatgatgcccagtgcttaacaagaccatactacagtgacgtggacatcatgaragacatcgcctctgggctaataggactacttctaatctgtaagagcagatccctggacaggcgaggaatacagagggcagcagacatcgaacagcaggct

SEQ ID NO: 8620 - DNA, 201 bp, Homo sapiens
gtggatgatgttatccaagttcgttttaaaaatttagcatccagaccgtattctctacatgcccatggactttcctatgaaaaatcatcagagggaaagasttatgaagatgactctcctgaatggtttaaggaagataatgctgttcagccaaatagcagttatacctacgtatggcatgccactgagcgatcagggcca

SEQ ID NO: 8621 - DNA, 201 bp, Homo sapiens
taggaatcaggtcattccgaaactcatcattgaatcaggaagaagaagagttcaatcttactgccctagctctggagaatggcactgaattcgtttcttcraacacagatataattgttggttcaaattattcttccccaagtaatattagtaagttcactgtcaataaccttgcagaacctcagaaagccccttctcacc

SEQ ID NO: 8622 - DNA, 201 bp, Homo sapiens
tagacttcagccagacaaacctctctccagaactcagtcaaacaaacctttccccagccctcggtcagatgcccctttctccagaccccagccatacaacyctttctctagacctcagccagacaaacctctctccagaactcagtcagacaaacctttccccagacctcagtgagatgcccctctttgcagatctcagtc

SEQ ID NO: 8623 - DNA, 201 bp, Homo sapiens
tcggaattcttggtcctattatcagagctgaagtggatgatgttatccaagttcgttttaaaaatttagcatccagaccgtattctctacatgcccatggrctttcctatgaaaaatcatcagagggaaagacttatgaagatgactctcctgaatggtttaaggaagataatgctgttcagccaaatagcagttatacct

SEQ ID NO: 8624 - DNA, 201 bp, Homo sapiens
ctggatgaaattactagcacataaagttgggagacacctaagccaagacactggttctccttccggaatgaggccctgggaggaccttcctagccaagacwctggttctccttccagaatgaggccctggaaggaccctcctagtgatctgttactcttaaaacaaagtaactcatctaagattttggttgggagatggca

SEQ ID NO: 8625 - DNA, 201 bp, Homo sapiens
atctgtaagagcagatccctggacaggcgaggaatacagagggcagcagacatcgaacagcaggctgtgtttgctgtgtttgatgagaacaaaagctggtmccttgaggacaacatcaacaagttttgtgaaaatcctgatgaggtgaaacgtgatgaccccaagttttatgaatcaaacatcatgagcactatcaatggc

SEQ ID NO: 8626 - DNA, 201 bp, Homo sapiens
tgacagtgactggccccaaggagacagcctccatttttgccacctatcctgccccctatctgtccctgaacaatggcttcctggatcaggttctgggcacygggatgctgattgtggggctcttggccatcctggacagacggaacaagggagtccctgcgggtctggagcctgtggtggtggggatgctgatcctggccc

SEQ ID NO: 8627 - DNA, 201 bp, Homo sapiens
gtgcatcgttggacgcctcccctgggtcaagctccccatttacatcttggtgcagttgctgtctgctttctgtgcttcgggagccacctatgttctctacyatgatgccctacagaactatacaggtgggaacctgacagtgactggccccaaggagacagcctccatttttgccacctatcctgccccctatctgtccct

SEQ ID NO: 8628 - DNA, 201 bp, Homo sapiens
gcatcgttggacgcctcccctgggtcaagctccccatttacatcttggtgcagttgctgtctgctttctgtgcttcgggagccacctatgttctctaccaygatgccctacagaactatacaggtgggaacctgacagtgactggccccaaggagacagcctccatttttgccacctatcctgccccctatctgtccctga

SEQ ID NO: 8629 - DNA, 184 bp, Homo sapiens
agacagagggagcagtgaatagcaatagggtgtttccaccatggtcttcactcaggccccggctgaaatcatgggccacctccrgatacgcagcctcctggcccggcagtgcctggcagagtttctgggtgtgtttgtactcatgctcctcacccaaggagctgtggcccaggctgtcaccagt

SEQ ID NO: 8630 - DNA, 201 bp, Homo sapiens
tgcctcagctcagatgctggagtgtaagctatgattaggacaaccctcacttcactcatggaccctggagccagccactgaccccgcctgggaacaacagwcattcttcctctttgttaatgtgccagaacctgggaggcttctctgtttatctgtttggcatcccttcctcctaaactaagaaggatcctggacagggag

SEQ ID NO: 8631 - DNA, 201 bp, Homo sapiens; identical to SEQ ID NO: 8626

SEQ ID NO: 8632 - DNA, 201 bp, Homo sapiens; identical to SEQ ID NO: 8627

SEQ ID NO: 8633 - DNA, 201 bp, Homo sapiens; identical to SEQ ID NO: 8628

SEQ ID NO: 8634 - DNA, 184 bp, Homo sapiens; identical to SEQ ID NO: 8629

SEQ ID NO: 8635 - DNA, 201 bp, Homo sapiens; identical to SEQ ID NO: 8630

SEQ ID NO: 8636 - DNA, 201 bp, Homo sapiens; identical to SEQ ID NO: 8626

SEQ ID NO: 8637 - DNA, 201 bp, Homo sapiens; identical to SEQ ID NO: 8627

SEQ ID NO: 8638 - DNA, 201 bp, Homo sapiens; identical to SEQ ID NO: 8628

SEQ ID NO: 8639 - DNA, 172 bp, Homo sapiens
cagtgaatagcaatagggtgtttccaccatggtcttcactcaggccccggctgaaatcatgggccacctccrgatacgcagcctcctggcccggcagtgcctggcagagtttctgggtgtgtttgtactcatggggcccacctgaatccagccttctccctggccatgtgca

SEQ ID NO: 8640 - DNA, 201 bp, Homo sapiens; identical to SEQ ID NO: 8630

SEQ ID NO: 8641 - DNA, 201 bp, Homo sapiens
ctgtagactggaccttaagcagtggaattcttgtctcctgttcaggtgaagtgatctgtgaacctcccaacaacaaactggacaaattcagcggaaccctstactggaaggaaaataagttccctctgagcaaccagaacatgctgctgcggggctgtgtgctgcgaaacaccgagtggtgcttcgggctggtcatctttg

SEQ ID NO: 8642 - DNA, 201 bp, Homo sapiens
aagagctgctcaacaccaccatggaccaccttaatgagtacgcaggggaagggctgaggaccctggtgctggcctacaaggatctggatgaagagtactaygaggagtgggctgagcgacgcctccaggccagcctggcccaggacagccgggaggacaggctggctagcatctatgaggaggttgagaacaacatgatgc

SEQ ID NO: 8643 - DNA, 201 bp, Homo sapiens
gagcgctgagggtctcccatgggattgctgggatcttgctgggtgagatggcagtgtgtgcaaaaaagcgccccccagaagaagaaaggagggcgcgggcyaatgaccgagaatacaatgagaaattccagtatgcgagtaactgcatcaagacctccaagtacaatattctcaccttcctgcctgtcaacctctttgagc

SEQ ID NO: 8644 - DNA, 201 bp, Homo sapiens
gtgcctttggttcttgtcctcaccatcacagctgttaaagatgccactgatgactatttccgccacaagagcgataaccaggtgaataaccgccagtctcrggtgctgatcaatggaatcctccagcaggagcagtggatgaatgtctgtgttggtgatattatcaagctagaaaataaccagtttgtggcggctgtagac

SEQ ID NO: 8645 - DNA, 201 bp, Homo sapiens
tgagcgctgagggtctcccatgggattgctgggatcttgctgggtgagatggcagtgtgtgcaaaaaagcgccccccagaagaagaaaggagggcgcgggstaatgaccgagaatacaatgagaaattccagtatgcgagtaactgcatcaagacctccaagtacaatattctcaccttcctgcctgtcaacctctttgag

SEQ ID NO: 8646 - DNA, 201 bp, Homo sapiens
ggcatgggcagtacggggccgccggggcgggcgccgagcgctgagcgctgagggtctcccatgggattgctgggatcttgctgggtgagatggcagtgtgygcaaaaaagcgccccccagaagaagaaaggagggcgcgggctaatgaccgagaatacaatgagaaattccagtatgcgagtaactgcatcaagacctcca

SEQ ID NO: 8647 - DNA, 201 bp, Homo sapiens
cccaaaacaatcaccgtccatgagatgggcacagccatcacctaccagctgctggccatcctggacttcaacaacatccgcaagcggatgtcggtcatagkgcggaatccagaggggaagatccgactctactgcaaaggggctgacactatcctactggacagactgcaccactccactcaagagctgctcaacaccacc

SEQ ID NO: 8648 - DNA, 201 bp, Homo sapiens
atgacatgactgaggttttcatagtcactggccatactgtcctggaggtgcgggaggagctcaggaaagcccgggagaagatgatggactcatcccgctcygtaggcaacggcttcacctatcaggacaagctttcttcttccaagctaacttctgtcctggaggccgttgctggggagtacgccctggtcataaatggtc

SEQ ID NO: 8649 - DNA, 201 bp, Homo sapiens
atgggctcttcgacatgtttcccaaccagttccggtttgtggggaatgcccagaacaccttggcccagcccacggtgtggctgaccattgtgctcaccacrgtcgtctgcatcatgcccgtggttgccttccgattcctcaggctcaacctgaagccggatctctccgacacggtccgctacacacagctcgtgaggaaga

SEQ ID NO: 8650 - DNA, 201 bp, Homo sapiens
aggtcatccgtctgggccacagctacttcatcaactgggataagaagatgttctgcatgaagaagcggacgcctgcagaagcccgcaccaccaccctaaaygaggagctgggccaggtggagtacatcttctccgacaagacgggcaccctcacccagaacatcatggttttcaacaagtgctccatcaatggccacagct

SEQ ID NO: 8651 - DNA, 201 bp, Homo sapiens
gtggcggtgccgacaagcccctcaagggctgaaggccgaggatggatgccctgtgccagtgaccagagcacccagggctggccagtcactgagggaacagygtctcggaactgctggtcctcattccttgcttcccgtccccccggtagactctgtcctgctggtcccaccacacatggctgggacatctgttcccagctg

SEQ ID NO: 8652 - DNA, 201 bp, Homo sapiens
cccccggtagactctgtcctgctggtcccaccacacatggctgggacatctgttcccagctgtaggcccttccaccagctggggagctagagggagcaggyccaagggcagagcagaggctgaggcacggggagccagccccactcggggaccagaagtggaaccaaaaacaagaaaaaactgtgagagattgtgtctgcc

SEQ ID NO: 8653 - DNA, 201 bp, Homo sapiens
ttgtcctcaccatcacagctgttaaagatgccactgatgactatttccgccacaagagcgataaccaggtgaataaccgccagtctcaggtgctgatcaayggaatcctccagcaggagcagtggatgaatgtctgtgttggtgatattatcaagctagaaaataaccagtttgtggcggctgtagactggaccttaagca

SEQ ID NO: 8654 - DNA, 201 bp, Homo sapiens
tcacctcagaattgggagacatcagtaagcttgccaagtttgacggtgaagtgatctgtgaacctcccaacaacaaactggacaaattcagcggaaccctstactggaaggaaaataagttccctctgagcaaccagaacatgctgctgcggggctgtgtgctgcgaaacaccgagtggtgcttcgggctggtcatctttg

SEQ ID NO: 8655 - DNA, 201 bp, Homo sapiens
ccaaggagatgcccgagaagtgggcccgggcccaggcgcctccctcttggagccgaaagaagccctcttgggggacagaagaagaaaggagggcgcgggcyaatgaccgagaatacaatgagaaattccagtatgcgagtaactgcatcaagacctccaagtacaatattctcaccttcctgcctgtcaacctctttgagc

SEQ ID NO: 8656 - DNA, 201 bp, Homo sapiens
gtgcctttggttcttgtcctcaccatcacagctgttaaagatgccactgatgactatttccgccacaagagcgataaccaggtgaataaccgccagtctcrggtgctgatcaatggaatcctccagcaggagcagtggatgaatgtctgtgttggtgatattatcaagctagaaaataaccagtttgtggcggcggatctc

SEQ ID NO: 8657 - DNA, 201 bp, Homo sapiens
cccaaggagatgcccgagaagtgggcccgggcccaggcgcctccctcttggagccgaaagaagccctcttgggggacagaagaagaaaggagggcgcgggstaatgaccgagaatacaatgagaaattccagtatgcgagtaactgcatcaagacctccaagtacaatattctcaccttcctgcctgtcaacctctttgag

SEQ ID NO: 8658 - DNA, 201 bp, Homo sapiens
ttgtcctcaccatcacagctgttaaagatgccactgatgactatttccgccacaagagcgataaccaggtgaataaccgccagtctcaggtgctgatcaayggaatcctccagcaggagcagtggatgaatgtctgtgttggtgatattatcaagctagaaaataaccagtttgtggcggcggatctcctcctcctttcca

SEQ ID NO: 8659 - DNA, 201 bp, Homo sapiens; identical to SEQ ID NO: 8641

SEQ ID NO: 8660 - DNA, 201 bp, Homo sapiens
tgctcaacaccaccatggaccaccttaatgtgggtgagtacgcaggggaagggctgaggaccctggtgctggcctacaaggatctggatgaagagtactaygaggagtgggctgagcgacgcctccaggccagcctggcccaggacagccgggaggacaggctggctagcatctatgaggaggttgagaacaacatgatgg

SEQ ID NO: 8661 - DNA, 201 bp, Homo sapiens; identical to SEQ ID NO: 8643

SEQ ID NO: 8662 - DNA, 201 bp, Homo sapiens; identical to SEQ ID NO: 8644

SEQ ID NO: 8663 - DNA, 201 bp, Homo sapiens; identical to SEQ ID NO: 8645

SEQ ID NO: 8664 - DNA, 201 bp, Homo sapiens; identical to SEQ ID NO: 8646

SEQ ID NO: 8665 - DNA, 201 bp, Homo sapiens; identical to SEQ ID NO: 8647

SEQ ID NO: 8666 - DNA, 201 bp, Homo sapiens; identical to SEQ ID NO: 8648

SEQ ID NO: 8667 - DNA, 201 bp, Homo sapiens; identical to SEQ ID NO: 8649

SEQ ID NO: 8668 - DNA, 201 bp, Homo sapiens; identical to SEQ ID NO: 8650

SEQ ID NO: 8669 - DNA, 201 bp, Homo sapiens; identical to SEQ ID NO: 8651

SEQ ID NO: 8670 - DNA, 201 bp, Homo sapiens; identical to SEQ ID NO: 8652

SEQ ID NO: 8671 - DNA, 201 bp, Homo sapiens; identical to SEQ ID NO: 8653

SEQ ID NO: 8672 - DNA, 201 bp, Homo sapiens
gctactgtggtcagacccagggacagcctccctgcccctgctcatggactctgtcatccaggccctggctgagctggagcagaaagtgccagctgccaagrccagacacacagcttctgcgtggctgatgtcagctccaaactctggcccccacaatcgcctctaccacttcctgctgggggcatggagcctcaatgctac

SEQ ID NO: 8673 - DNA, 201 bp, Homo sapiens
gctggaaacctgggcctgaccttcctccgaggttcccagacccagagccatccagacctgggaactgagggctgctgggaccagctctctgcccctcggamctttacgcttttggaccccaaggcatctctgttaaccatggccttcctcaatggcgccctggatggggtcatccttggagactacctgagccggactcct

SEQ ID NO: 8674 - DNA, 201 bp, Homo sapiens
ctccatgcagcgctaccaccaggacacgcaaggctggggagacatcggctacagtttcgtggtgggctcggacggctacgtgtacgagggacgcggctggyactgggtgggcgcccacacgctcggccacaactcccggggcttcggcgtggccatagtgggcaactacaccgcggcgctgcccaccgaggccgctctgcg

SEQ ID NO: 8675 - DNA, 201 bp, Homo sapiens
ggaaggaatatggggtggtgctggcacctgatggctcgaccgtggctgtggagcctctgctggcggggctggaggcagggctgcaagggcgcagggtcatwaatttgcccttggacagcatggctgccccttgggagactggagatacctttccagatgttgtggccattgctccagatgtaagagccacctcctccccag

SEQ ID NO: 8676 - DNA, 201 bp, Homo sapiens
tgaccaaggaggtggcccgacatgacgtacgagaagggaaggaatatggggtggtgctggcacctgatggctcgaccgtggctgtggagcctctgctggcrgggctggaggcagggctgcaagggcgcagggtcataaatttgcccttggacagcatggctgccccttgggagactggagatacctttccagatgttgtgg

SEQ ID NO: 8677 - DNA, 201 bp, Homo sapiens
gggagacatcggctacagtttcgtggtgggctcggacggctacgtgtacgagggacgcggctggcactgggtgggcgcccacacgctcggccacaactccyggggcttcggcgtggccatagtgggcaactacaccgcggcgctgcccaccgaggccgctctgcgcacggtgcgcgacacgctcccgagttgtgcggtgcg

SEQ ID NO: 8678 - DNA, 201 bp, Homo sapiens
ggcccagcaggtgtggggaacccttgtccttctacagaggctggagccagtacacctccagcttcagtgcatgagccaagaacagctggcccaggtggctrccaatgctaccaaggaattcactgaggccttcctgggatgcccggccatccacccccgctgccgctggggagcggcgccttatcggggccgcccgaagct

SEQ ID NO: 8679 - DNA, 201 bp, Homo sapiens
ctctaccacttcctgctgggggcatggagcctcaatgctacagagttggatccctgcccactaagcccagagctgttaggcctgaccaaggaggtggcccracatgacgtacgagaagggaaggaatatggggtggtgctggcacctgatggctcgaccgtggctgtggagcctctgctggcggggctggaggcagggctg

SEQ ID NO: 8680 - DNA, 201 bp, Homo sapiens
gcccagcctttgcgggtcactctgcgggcaacatccctgatcctgtgacttctgcctatgcagcctcagctcagccccagacccagccagcctgtcctttycccagctcctaatacctctacctttccagccaaggcatggaccctgacacctgccaacagcccctctgccctcacaacctcagcctggccttcatgactt

SEQ ID NO: 8681 - DNA, 201 bp, Homo sapiens
acccagagccatccagacctgggaactgagggctgctgggaccagctctctgcccctcggacctttacgcttttggaccccaaggcatctctgttaaccawggccttcctcaatggcgccctggatggggtcatccttggagactacctgagccggactcctgagccccggccatccctcagccacttgctgagccagtac

SEQ ID NO: 8682 - DNA, 201 bp, Homo sapiens
ctggcccaggtggctgccaatgctaccaaggaattcactgaggccttcctgggatgcccggccatccacccccgctgccgctggggagcggcgccttatcrgggccgcccgaagctgctgcagctgccgctgggattcttgtacgtgcatcacacctacgtgcctgcaccaccctgcacggacttcacgcgctgcgcagcc

SEQ ID NO: 8683 - DNA, 201 bp, Homo sapiens
gggtcatccttggagactacctgagccggactcctgagccccggccatccctcagccacttgctgagccagtactatggggctggggtggccagagacccmgggttccgcagcaacttccgacggcagaacggtgctgctctgacttcagcctccatcctggcccagcaggtgtggggaacccttgtccttctacagaggc

SEQ ID NO: 8684 - DNA, 201 bp, Homo sapiens
acttgctgagccagtactatggggctggggtggccagagacccagggttccgcagcaacttccgacggcagaacggtgctgctctgacttcagcctccatsctggcccagcaggtgtggggaacccttgtccttctacagaggctggagccagtacacctccagcttcagtgcatgagccaagaacagctggcccaggtgg

SEQ ID NO: 8685 - DNA, 201 bp, Homo sapiens
gctccacgaggcccctgccccctgcctgtaacagctgtgcccgcacagcctcagccaggcccccaacttcccggcggcacgtctattcaggaaacctaggyccagcctttgcgggtcactctgcgggcaacatccctgatcctgtgacttctgcctatgcagcctcagctcagccccagacccagccagcctgtcctttcc

SEQ ID NO: 8686 - DNA, 201 bp, Homo sapiens
tcctaatacctctacctttccagccaaggcatggaccctgacacctgccaacagcccctctgccctcacaacctcagcctggccttcatgacttctctacscaagtcacaacctgtcaggctgcaccacctcatcctggcccgccgaaccttgacctcacccctgcccctacccgaaggccctctgtccacacaacatgaa

SEQ ID NO: 8687 - DNA, 201 bp, Homo sapiens; identical to SEQ ID NO: 8672

SEQ ID NO: 8688 - DNA, 201 bp, Homo sapiens; identical to SEQ ID NO: 8673

SEQ ID NO: 8689 - DNA, 201 bp, Homo sapiens; identical to SEQ ID NO: 8674

SEQ ID NO: 8690 - DNA, 201 bp, Homo sapiens; identical to SEQ ID NO: 8675

SEQ ID NO: 8691 - DNA, 201 bp, Homo sapiens; identical to SEQ ID NO: 8676

SEQ ID NO: 8692 - DNA, 201 bp, Homo sapiens; identical to SEQ ID NO: 8677

SEQ ID NO: 8693 - DNA, 201 bp, Homo sapiens; identical to SEQ ID NO: 8678

SEQ ID NO: 8694 - DNA, 201 bp, Homo sapiens; identical to SEQ ID NO: 8679

SEQ ID NO: 8695 - DNA, 201 bp, Homo sapiens; identical to SEQ ID NO: 8681

SEQ ID NO: 8696 - DNA, 201 bp, Homo sapiens; identical to SEQ ID NO: 8682

SEQ ID NO: 8697 - DNA, 201 bp, Homo sapiens; identical to SEQ ID NO: 8683

SEQ ID NO: 8698 - DNA, 201 bp, Homo sapiens; identical to SEQ ID NO: 8684

SEQ ID NO: 8699 - DNA, 201 bp, Homo sapiens
gcagtgatagaaattgttcagtgtaggatgtgccacctccagttcccaggagaaaagtgctccagaggaagaggaatatgcacagcaacaacagaagaggsctgcatggttggaaggatgttcaaaagggatggtaatccctggttaaccttcatgggctgcctaaagaactgtgctgatgtgaaaggcataaggtggagt

SEQ ID NO: 8700 - DNA, 201 bp, Homo sapiens
cttcttggagtttgttcatgaatgctgatcccagggtgaggagaagattgggacatagaaaggaaactgcatcagaaacatgaacagagaaagattgtctrccttctagaatcagatctgtttggggctgggggttggagaataaaagcaggagaagtctatgggattctagaaatagtacctgcatccagcttccctgcc

SEQ ID NO: 8701 - DNA, 201 bp, Homo sapiens
aatggacaagtccctcttgctggaactccccatcctgctctgctgctttagggcattatctggatcactttcaatgagaaatgatgcagtgatagaaattrttcagtgtaggatgtgccacctccagttcccaggagaaaagtgctccagaggaagaggaatatgcacagcaacaacagaagaggcctgcatggttggaag

SEQ ID NO: 8702 - DNA, 201 bp, Homo sapiens
gacaagtccctcttgctggaactccccatcctgctctgctgctttagggcattatctggatcactttcaatgagaaatgatgcagtgatagaaattgttcrgtgtaggatgtgccacctccagttcccaggagaaaagtgctccagaggaagaggaatatgcacagcaacaacagaagaggcctgcatggttggaaggatg

SEQ ID NO: 8703 - DNA, 201 bp, Homo sapiens
acacacacacacacacactacagaagaggattgcaaacacatggctccatcttctgcacacgaaaggaaagtccctctccttttctacagtctctgtcacrccccttaaaataagtaaataaataaccttgagagaaagaacaagatcaatatatcctgcaggttgctacaaacccttgtgctttcactgtatagccagtt

SEQ ID NO: 8704 - DNA, 201 bp, Homo sapiens
aagttaatggttcttctgtgactccaatttctgggtgaggttgttgcctcagcctcttcacaatgactttctaaaaaaaatcacacacacacacacacacactacagaagaggattgcaaacacatggctccatcttctgcacacgaaaggaaagtccctctccttttctacagtctctgtcacgccccttaaaataagta

SEQ ID NO: 8705 - DNA, 201 bp, Homo sapiens
gtctggccactagacatctcatcagccacttgtgtgaagagatgccccatgaccccagatgcctctcccacccttacctccatctcacacacttgagcttkccactctgtataattctaacatcctggagaaaaatggcagtttgaccgaacctgttcacaagggtagaggctgatttctaacgaaacttgtagaatgaag

SEQ ID NO: 8706 - DNA, 201 bp, Homo sapiens
gttaatggttcttctgtgactccaatttctgggtgaggttgttgcctcagcctcttcacaatgactttctaaaaaaaatcacacacacacacacacacacyacagaagaggattgcaaacacatggctccatcttctgcacacgaaaggaaagtccctctccttttctacagtctctgtcacgccccttaaaataagtaaa

SEQ ID NO: 8707 - DNA, 201 bp, Homo sapiens
cctgtgatagaaattgttcagtgtaggatgtgccacctccagttcccaggagaaaagtgctccagaggaagaggaatatgcacagcaacaacagaagaggsctgcatggttggaaggatgttcaaaagggatggtaatccctggttaaccttcatgggctgcctaaagaactgtgctgatgtgaaaggcataaggtggagt

SEQ ID NO: 8708 - DNA, 201 bp, Homo sapiens; identical to SEQ ID NO: 8700

SEQ ID NO: 8709 - DNA, 201 bp, Homo sapiens
gctctgctgctttagggcattatctggatcactttcaatgagaaatgatgcagtcaatgaaatagttgctgtgaaaaacaattttcctgtgatagaaattrttcagtgtaggatgtgccacctccagttcccaggagaaaagtgctccagaggaagaggaatatgcacagcaacaacagaagaggcctgcatggttggaag

SEQ ID NO: 8710 - DNA, 201 bp, Homo sapiens
tgctgctttagggcattatctggatcactttcaatgagaaatgatgcagtcaatgaaatagttgctgtgaaaaacaattttcctgtgatagaaattgttcrgtgtaggatgtgccacctccagttcccaggagaaaagtgctccagaggaagaggaatatgcacagcaacaacagaagaggcctgcatggttggaaggatg

SEQ ID NO: 8711 - DNA, 201 bp, Homo sapiens; identical to SEQ ID NO: 8703

SEQ ID NO: 8712 - DNA, 201 bp, Homo sapiens; identical to SEQ ID NO: 8704

SEQ ID NO: 8713 - DNA, 201 bp, Homo sapiens; identical to SEQ ID NO: 8705

SEQ ID NO: 8714 - DNA, 201 bp, Homo sapiens; identical to SEQ ID NO: 8706

SEQ ID NO: 8715 - DNA, 201 bp, Homo sapiens
gcagtgatagaaattgttcagtgtaggatgtgccacctccagttcccaggagaaaagtgctccagaggaagaggaatatgcacagcaacaacagaagaggsctgcatggttggaaggatgttcaaaagtaagttgtgggttggggaaaagaagaacgggcagaggacgtatacagggacgtatcagccacaggggaaagga

SEQ ID NO: 8716 - DNA, 201 bp, Homo sapiens; identical to SEQ ID NO: 8701

SEQ ID NO: 8717 - DNA, 171 bp, Homo sapiens
tgcacagcaacaacagaagaggcctgcatggttggaaggatgttcaaaagtaagttgtgggttggggaaaagaagaacgggcagaggacgtatacagggaygtatcagccacaggggaaaggagagatcttactttacttttactataggcagtctcatacctgggatggc

SEQ ID NO: 8718 - DNA, 201 bp, Homo sapiens; identical to SEQ ID NO: 8702

SEQ ID NO: 8719 - DNA, 191 bp, Homo sapiens
gagctgaggaggagctgaaaatgcagatttagcatcaagcacagacctacactcgctctttctctccggtacacacagctccccacattckcacccctgcccgcgcgccgggccgcctgactgcacggcttcccctccagccagatgctggagaacacacactgattcgctgctttccaagaccctgttca

SEQ ID NO: 8720 - DNA, 201 bp, Homo sapiens
cgcctttcccaccgccctccctccccagctccgcctctgtcctcgctccacgtttcaggcaggcacctagcaattccatcacccgtacaggcaattccgtyttcttaatctgaagcttcactcactgtcaatgattattttcattacaatggaaacaatcttttttactctatgccccaaatatagcgttcccaacaacat

SEQ ID NO: 8721 - DNA, 201 bp, Homo sapiens
tctccaggcaccatctcccttcctgtgggagcagagagcttagcctggagcacctttccttcaagccagcaacacagagcactaggttcaattccctgaargtggccactttaagagagaaatctgaaaaccccatttgctttcttttctcccatattggcatggatttctgtcttctctaacaccttgtgaccttctcta

SEQ ID NO: 8722 - DNA, 201 bp, Homo sapiens
cttcccctatgggcaccaagtccattttgctgagccggcgtccaagggatgacgactccaaggtgggctttgacaagtggcctttcatgaccactcacacrtggggggaagacgcccgaggcacctggaccctggagctgggatttgtcggcagcgccccgcagaagggggtgctgaaggagtggaccctgatgctgcatg

SEQ ID NO: 8723 - DNA, 201 bp, Homo sapiens
aggtgaaaggggcacgtttgaagatgcgagcgctatcttcacatagttctccagttgtatggagcctcttctgccaagagagggccatgcaattcatcccrgaggaacctgaggcctgaaggaggtgagagaagacctctgtgaggaaagcacacagtcaccttctcggcaactaagcagtccctgagaccatttaacatg

SEQ ID NO: 8724 - DNA, 201 bp, Homo sapiens
atatgccacagctgattgacatctacagcgccagctggggccccacagacaacggcaagacagtggatgggccccgggagctcacgctgcaggccatggcygatggcgtgaacaagggccgcggcggcaaaggcagcatctacgtgtgggcctccggggacggcggcagctatgacgactgcaactgcgacggctacgcct

SEQ ID NO: 8725 - DNA, 201 bp, Homo sapiens
tgagagaagacctctgtgaggaaagcacacagtcaccttctcggcaactaagcagtccctgagaccatttaacatgcaacccgaaggttatggtcaatccyaaaagtcaccactccattcccaactagacattaccaaagtgacctacccagagattgcttctcatccccagtcccaatgcacatccattcccaagaaatg

SEQ ID NO: 8726 - DNA, 111 bp, Homo sapiens
aataataattaggttaacattgttgctccctgtgacaaaattttataagcaaatttcaaaagacatgttgtaaattaggaggctcaacaataaaacattaygctccagaaa

SEQ ID NO: 8727 - DNA, 201 bp, Homo sapiens
tggccatgtccaagaaagaggagctggaggaagagctggacgaagccgtggagagaagcctgaaaagcatccttaacaagaactagcgctgcacatccgcytttcccaccgccctccctccccagctccgcctctgtcctcgctccacgtttcaggcaggcacctagcaattccatcacccgtacaggcaattccgtcttc

SEQ ID NO: 8728 - DNA, 201 bp, Homo sapiens
tgctttgtcttcagcctctccaggcaccatctcccttcctgtgggagcagagagcttagcctggagcacctttccttcaagccagcaacacagagcactargttcaattccctgaaggtggccactttaagagagaaatctgaaaaccccatttgctttcttttctcccatattggcatggatttctgtcttctctaacac

SEQ ID NO: 8729 - DNA, 201 bp, Homo sapiens
ctttcccaccgccctccctccccagctccgcctctgtcctcgctccacgtttcaggcaggcacctagcaattccatcacccgtacaggcaattccgtcttyttaatctgaagcttcactcactgtcaatgattattttcattacaatggaaacaatcttttttactctatgccccaaatatagcgttcccaacaacatcca

SEQ ID NO: 8730 - DNA, 201 bp, Homo sapiens
gcaattccatcacccgtacaggcaattccgtcttcttaatctgaagcttcactcactgtcaatgattattttcattacaatggaaacaatcttttttactytatgccccaaatatagcgttcccaacaacatccatgtcctatgtgtgactctaaattctttatttctgtcattcaaatgggtgatatcctgaaaaaaaaa

SEQ ID NO: 8731 - DNA, 201 bp, Homo sapiens
ctcacatagctacccaaaaaagaatgtcccttttcctaagtcactttgaggtgtctcaatctgatctgagtgagaggcgacaggagtatttttttttttttacagctttacacacacagatgtgggctttgatttccaagtaatataatggaagagaaatctcatactcccccacagtttgatgtcattaatgtgttggga

SEQ ID NO: 8732 - DNA, 201 bp, Homo sapiens
agttcatcccagccccaattttctggggctcctcacatagctacccaaaaaagaatgtcccttttcctaagtcactttgaggtgtctcaatctgatctgastgagaggcgacaggagtatttttttttttttacagctttacacacacagatgtgggctttgatttccaagtaatataatggaagagaaatctcatactcc

SEQ ID NO: 8733 - DNA, 191 bp, Homo sapiens; identical to SEQ ID NO: 8719

SEQ ID NO: 8734 - DNA, 201 bp, Homo sapiens; identical to SEQ ID NO: 8720

SEQ ID NO: 8735 - DNA, 201 bp, Homo sapiens; identical to SEQ ID NO: 8721

SEQ ID NO: 8736 - DNA, 201 bp, Homo sapiens
cagtttgtatagagttcatcccagccccaattttctggggctcctcacatagctacccaaaagagaaaaaaaattaagacaagcctggcaacacacctggwgaagagtagtttactagcttttcaaacaagaatgtcccttttcctaagtcactttgaggtgtctcaatctgatctgagtgagaggcgacaggagtatttt

SEQ ID NO: 8737 - DNA, 201 bp, Homo sapiens; identical to SEQ ID NO: 8722

SEQ ID NO: 8738 - DNA, 201 bp, Homo sapiens; identical to SEQ ID NO: 8723

SEQ ID NO: 8739 - DNA, 201 bp, Homo sapiens; identical to SEQ ID NO: 8724

SEQ ID NO: 8740 - DNA, 201 bp, Homo sapiens; identical to SEQ ID NO: 8725

SEQ ID NO: 8741 - DNA, 111 bp, Homo sapiens; identical to SEQ ID NO: 8726

SEQ ID NO: 8742 - DNA, 201 bp, Homo sapiens; identical to SEQ ID NO: 8727

SEQ ID NO: 8743 - DNA, 201 bp, Homo sapiens; identical to SEQ ID NO: 8728

SEQ ID NO: 8744 - DNA, 201 bp, Homo sapiens; identical to SEQ ID NO: 8729

SEQ ID NO: 8745 - DNA, 201 bp, Homo sapiens; identical to SEQ ID NO: 8730

SEQ ID NO: 8746 - DNA, 201 bp, Homo sapiens
gtttactagcttttcaaacaagaatgtcccttttcctaagtcactttgaggtgtctcaatctgatctgagtgagaggcgacaggagtatttttttttttttacagctttacacacacagatgtgggctttgatttccaagtaatataatggaagagaaatctcatactcccccacagtttgatgtcattaatgtgttggga

SEQ ID NO: 8747 - DNA, 201 bp, Homo sapiens
acaagcctggcaacacacctggtgaagagtagtttactagcttttcaaacaagaatgtcccttttcctaagtcactttgaggtgtctcaatctgatctgastgagaggcgacaggagtatttttttttttttacagctttacacacacagatgtgggctttgatttccaagtaatataatggaagagaaatctcatactcc

SEQ ID NO: 8748 - DNA, 201 bp, Homo sapiens
cctgccccagccaaggctgaaaatgaagaggctgcggcttgccctgcctgggaacgtggggcctggcctgaaggagctgagaggagctcccggcctgacayattgctctcccctgagcagccagtgtgtcctgcagggggctccgggggcccacccagcagtgcctctcctgaggtcgaagctgggccccagggatgtgcc

SEQ ID NO: 8749 - DNA, 201 bp, Homo sapiens
tctccccagctcctggtccccccacacctgccccggaatcccatactcctgcacccttctcttggggcacagccgagtatgacagtgtggtggctgcagtrcaggagggggcagctgagttggaaggtgggccatactcccccctggggaaggactaccgcaaggctgaaggggaaagggaagaagaaggtagggctgagg

SEQ ID NO: 8750 - DNA, 201 bp, Homo sapiens
agagaaggagctttcatctcctatctcacccaagagcctccagtctgacactccaaccttcagctatgcagccctggcaggacccactgtacccccaaggmcagagccagggccaagtatggagcccagcctcaccccacctgcagttcccccccgtgctcctatcctgagcaaaggcccaagcccccctcttaatggtaa

SEQ ID NO: 8751 - DNA, 201 bp, Homo sapiens
gggagctaagctgtgagcggaaggtctggttccctcacgagctggatggccagggggcccgcccacactacactgaggaacgggaaagcactttcctagakgagggcccagatgatgagcaagaagtacccctgcgggaacacgcaacccggagcccctgggcctcagacttcaaggatttccaggaatcctcaccacaga

SEQ ID NO: 8752 - DNA, 201 bp, Homo sapiens
gttgctacatcttcccaggtggtcgtggggactctgccctctttgctgtcaatggtttcaacatcctggtggatggtggctctgatcgcaagtcctgtttktggaagctggtacggcacttggaccgcattgactcggtgctactcacacacattggggcagacaacctgccaggcatcaatggactactgcagcgcaaag

SEQ ID NO: 8753 - DNA, 201 bp, Homo sapiens
aaagatgctagaggaaaaatccccagaaaaggtcaaggccatggaagagaagttagaagctcttctggagaagaccaaagctctgggcctggaagagagcytagtgcaggagggcagggccagagagcaggaagaaaagtactggagggggcaggatgtggtccaggagtggcaagaaacatctcctaccagagaggagcc

SEQ ID NO: 8754 - DNA, 201 bp, Homo sapiens
gtggtactcaccaccccaggcctggccatgacccacctcctctcccacagccagacccccgcccatcccctccccgccctgatgtgtgcatggctgacccygaggggctcagctcagagtctgggagagtagagaggctacgggagaaggaaaaggttcaggggcgagtagggcgcagggccccaggcaaggccaagccag

SEQ ID NO: 8755 - DNA, 201 bp, Homo sapiens
ttggccctagctccagctccaagcctgcctggagacatgggtgatggcatcctgccgtgccacctggagtgctcagaggcagccacggagaagccaagccycttccaggttccctctgaggattgtgcagccaatggcccaactgaaaccagccctaaccccccaggccctgccccagccaaggctgaaaatgaagaggct

SEQ ID NO: 8756 - DNA, 201 bp, Homo sapiens
tggggctgtgcctaccaacctcaagcccagcaaaatcaaacagcgggctgatagcaaggagagcctcaaagccactaccaagacggccgtgagcaagttgkccaaacgggaggaggtggtagaagagggagccaaggaggcacgttcagagctggccaaggagttagccaagacagagaagaaggcaaaagagtcatctga

SEQ ID NO: 8757 - DNA, 201 bp, Homo sapiens
ccaagagcctccagtctgacactccaaccttcagctatgcagccctggcaggacccactgtacccccaaggccagagccagggccaagtatggagcccagmctcaccccacctgcagttcccccccgtgctcctatcctgagcaaaggcccaagcccccctcttaatggtaacatcctgagctgcagcccagataggaggt

SEQ ID NO: 8758 - DNA, 201 bp, Homo sapiens
tagccctcccttggactcacacctggggcctgcccgacccagtctggacttccctgcttcagcctttggcttctcctcattgcagccagctcccccacagmtgccctctccagctgaaccccgctcggcaccctgtggctcccttgccttctctggggatcgagctctggctctggctccaggaccccccaccagaacccg

SEQ ID NO: 8759 - DNA, 201 bp, Homo sapiens
gccctctccagctgaaccccgctcggcaccctgtggctcccttgccttctctggggatcgagctctggctctggctccaggaccccccaccagaacccggyatgatgaatacctggaagtgaccaaggcccccagcctggattcctcactgccccagctcccatcacccagttctcctggggcccctctcctctccaatct

SEQ ID NO: 8760 - DNA, 201 bp, Homo sapiens
ggccctggaaccaaaagacaaagacttagaagaaaaagacaaggccctggaacagaaggataagattccagaagagaaagacaaagccttagaacaaaagratacagccctggaacagaaggacaaggccctggaaccaaaagataaagacttggaacaaaaggacagggtcctagaacagaaggagaagatcccagaaga

SEQ ID NO: 8761 - DNA, 201 bp, Homo sapiens
acagagacctagaacagacagacaaagcccctgaacagaaacaccaggcccaggaacaaaaggataaagtctcagaaaagaaggatcaggccttagaacamaaatactgggctttgggacagaaggatgaagccctggaacaaaacattcaggctctggaagagaaccaccaaactcaggagcaggagagcctagtgcagg

SEQ ID NO: 8762 - DNA, 201 bp, Homo sapiens
actcagagactgagcagaccatctcagatgaggagatccatgatgagccggaggagcgcccagctccacccagatttcatacaagtacatatgacctgccygggcctgaaggtgctggcccattcgaagccagccaacctgccgatagtgctgttcctgctacctctggcaaagtctatggaacgccagagactgaactca

SEQ ID NO: 8763 - DNA, 201 bp, Homo sapiens
ggcacagccgagtatgacagtgtggtggctgcagtgcaggagggggcagctgagttggaaggtgggccatactcccccctggggaaggactaccgcaaggytgaaggggaaagggaagaagaaggtagggctgaggctcctgacaaaagctcacacagctcaaaggtaccagaggccagcaaaagccatgccaccacggag

SEQ ID NO: 8764 - DNA, 201 bp, Homo sapiens
tggggaaggactaccgcaaggctgaaggggaaagggaagaagaaggtagggctgaggctcctgacaaaagctcacacagctcaaaggtaccagaggccagsaaaagccatgccaccacggagcctgagcagactgagccggagcagagagagcccacaccctatcctgatgagagaagctttcagtatgcagacatctatg

SEQ ID NO: 8765 - DNA, 201 bp, Homo sapiens
gtggtccaggagtggcaagaaacatctcctaccagagaggagccggctggagaacagaaagagcttgccccggcatgggaggacacatctcctgagcaggmcaataggtattggaggggcagagaggatgtggccttggaacaggacacatactggagggagctaagctgtgagcggaaggtctggttccctcacgagctg

SEQ ID NO: 8766 - DNA, 201 bp, Homo sapiens
ccctcatggctggctgacatcccaccctgggtgcccaaggacagacccctcccccctgcacccctctccccagctcctggtccccccacacctgccccggmatcccatactcctgcacccttctcttggggcacagccgagtatgacagtgtggtggctgcagtgcaggagggggcagctgagttggaaggtgggccatac

SEQ ID NO: 8767 - DNA, 201 bp, Homo sapiens
gccctgatgtgtgcatggctgaccccgaggggctcagctcagagtctgggagagtagagaggctacgggagaaggaaaaggttcaggggcgagtagggcgyagggccccaggcaaggccaagccagcgtcccctgcacggcgtctggatcttcggggaaaacgctcacccacccctggtaaagggcctgcagatcgagcat

SEQ ID NO: 8768 - DNA, 201 bp, Homo sapiens
gcatggctgaccccgaggggctcagctcagagtctgggagagtagagaggctacgggagaaggaaaaggttcaggggcgagtagggcgcagggccccaggyaaggccaagccagcgtcccctgcacggcgtctggatcttcggggaaaacgctcacccacccctggtaaagggcctgcagatcgagcatcccgggccccac

SEQ ID NO: 8769 - DNA, 201 bp, Homo sapiens
gctgaccccgaggggctcagctcagagtctgggagagtagagaggctacgggagaaggaaaaggttcaggggcgagtagggcgcagggccccaggcaaggmcaagccagcgtcccctgcacggcgtctggatcttcggggaaaacgctcacccacccctggtaaagggcctgcagatcgagcatcccgggccccacctcga

SEQ ID NO: 8770 - DNA, 201 bp, Homo sapiens
gaggggctcagctcagagtctgggagagtagagaggctacgggagaaggaaaaggttcaggggcgagtagggcgcagggccccaggcaaggccaagccagygtcccctgcacggcgtctggatcttcggggaaaacgctcacccacccctggtaaagggcctgcagatcgagcatcccgggccccacctcgaccacgcagc

SEQ ID NO: 8771 - DNA, 201 bp, Homo sapiens
agtgaagatggcttctcctccaccatctggcccacccagtgccacccacacaccctttcatcagtccccagtggaagaaaagtctgagccccaagactttmaggaggcagactcctggggagacactaagcgcacaccaggtgtgggcaaagaagatgctgctgaggagacagtcaagccagggcctgaagagggcacact

SEQ ID NO: 8772 - DNA, 201 bp, Homo sapiens
tacctctggcaaagtctatggaacgccagagactgaactcacctaccccactaacatagtggctgcccctttggctgaagaggaacatgtgtcctcggccrcttcaatcactgagtgtgacaaactttcttcctttgccacatcagtggctgaggaccaatctgtggcctcacttacagctccccagacagaggagacagg

SEQ ID NO: 8773 - DNA, 201 bp, Homo sapiens
gcctagtcaatggactcaaggcaggaccaatggccttgagttccaagggcagctctggtgcccctgtatatgtggatctcgcctacatcccgaatcattgsagtggcaagactgctgaccttgacttcttccgtcgagtgcgtgcatcctactatgtggtcagtgggaatgaccctgccaatggcgagccaagccgggctg

SEQ ID NO: 8774 - DNA, 201 bp, Homo sapiens
caaggacagacccctcccccctgcacccctctccccagctcctggtccccccacacctgccccggaatcccatactcctgcacccttctcttggggcacasccgagtatgacagtgtggtggctgcagtgcaggagggggcagctgagttggaaggtgggccatactcccccctggggaaggactaccgcaaggctgaagg

SEQ ID NO: 8775 - DNA, 201 bp, Homo sapiens
caggaccaatggccttgagttccaagggcagctctggtgcccctgtatatgtggatctcgcctacatcccgaatcattgcagtggcaagactgctgacctwgacttcttccgtcgagtgcgtgcatcctactatgtggtcagtgggaatgaccctgccaatggcgagccaagccgggctgtgctggatgccctgctggagg

SEQ ID NO: 8776 - DNA, 201 bp, Homo sapiens
ctggggcccctctcctctccaatctgccacgacctgcctcaccagccctgtctgagggctcctcctctgaggctaccacgcctgtgatttcaagtgtggcrgagcgcttctctccaagccttgaggctgcagaacaggagtctggagagctggacccaggaatggaaccagctgcccacagcctctgggacctcactcctc

SEQ ID NO: 8777 - DNA, 201 bp, Homo sapiens
gctgtgcctaccaacctcaagcccagcaaaatcaaacagcgggctgatagcaaggagagcctcaaagccactaccaagacggccgtgagcaagttggccamacgggaggaggtggtagaagagggagccaaggaggcacgttcagagctggccaaggagttagccaagacagagaagaaggcaaaagagtcatctgagaag

SEQ ID NO: 8778 - DNA, 201 bp, Homo sapiens
gacaaggtagggaaaaagcaccttaaagaaaagatatcaaagctggaagaaaaaaaagacaaggagaaaaaagagatcaaaaaggagaggaaagagctcargaaggatgaaggaaggaaggaggagaagaaggatgccaagaaggaggagaagaggaaagataccaaacctgagctcaagaagatttccaagccagaccta

SEQ ID NO: 8779 - DNA, 201 bp, Homo sapiens
caaggagagcctcaaagccactaccaagacggccgtgagcaagttggccaaacgggaggaggtggtagaagagggagccaaggaggcacgttcagagctgkccaaggagttagccaagacagagaagaaggcaaaagagtcatctgagaagcccccagagaagcctgccaagcctgagagggtgaagacagagtcaagtga

SEQ ID NO: 8780 - DNA, 201 bp, Homo sapiens
ggggcgagtagggcgcagggccccaggcaaggccaagccagcgtcccctgcacggcgtctggatcttcggggaaaacgctcacccacccctggtaaagggyctgcagatcgagcatcccgggccccacctcgaccacgcagcaccacaagccaggtcaccccagcagaggaaaaggatggacacagccccatgtccaaagg

SEQ ID NO: 8781 - DNA, 201 bp, Homo sapiens
gtgaagatggcttctcctccaccatctggcccacccagtgccacccacacaccctttcatcagtccccagtggaagaaaagtctgagccccaagactttcmggaggcagactcctggggagacactaagcgcacaccaggtgtgggcaaagaagatgctgctgaggagacagtcaagccagggcctgaagagggcacacta

SEQ ID NO: 8782 - DNA, 201 bp, Homo sapiens
caaagccactaccaagacggccgtgagcaagttggccaaacgggaggaggtggtagaagagggagccaaggaggcacgttcagagctggccaaggagttakccaagacagagaagaaggcaaaagagtcatctgagaagcccccagagaagcctgccaagcctgagagggtgaagacagagtcaagtgaggcactgaaggc

SEQ ID NO: 8783 - DNA, 201 bp, Homo sapiens
ctgcagatcgagcatcccgggccccacctcgaccacgcagcaccacaagccaggtcaccccagcagaggaaaaggatggacacagccccatgtccaaaggmctagtcaatggactcaaggcaggaccaatggccttgagttccaagggcagctctggtgcccctgtatatgtggatctcgcctacatcccgaatcattgca

SEQ ID NO: 8784 - DNA, 201 bp, Homo sapiens
cagcccagataggaggtccccatcccccaaggaatcaggccggagtcactgggatgacagcactagtgactcagaactggagaagggggctcgggaacagscagaaaaagaggcccaatccccaagtcctcctcaccccattcctatggggtcccccacattatggccagaaactgaggcacatgttagccctcccttgga

SEQ ID NO: 8785 - DNA, 201 bp, Homo sapiens
cttgggctgggctaaatgggaggggttgtccctccccatcatccattcctgtgaggtgtctcaaaccaaagttaacagggagaggatgggggaggggacamattagaataggatagcatctgatgcctgagaaccctctcctagcactgtcaaatgctggtattgaatggggactgaggatgggtctcagagagcaacctc

SEQ ID NO: 8786 - DNA, 201 bp, Homo sapiens
cccgtactgaagctacgcagggcttggactatgtgccatcagctggtaccatctcacccacctcctcactggaagaagacaagggcttcaaatcaccaccmtgtgaggacttctctgtgactggggagtcagagaagagaggagagatcatagggaaaggcttgtctggagagagagctgtggaagaggaagaggaggaga

SEQ ID NO: 8787 - DNA, 201 bp, Homo sapiens
tgtctcttctaagcagctctctccagaaagccttggcaccctccagtttggggaactaaaccttgggaaggaagaaatggggcatctgatgcaggccgagratacctctcaccacacagctcccatgtctgttccagagccccatgcagccacagcgtcacctcccacagatgggacaactcgatactctgcacagacaga

SEQ ID NO: 8788 - DNA, 201 bp, Homo sapiens
tctcttctaagcagctctctccagaaagccttggcaccctccagtttggggaactaaaccttgggaaggaagaaatggggcatctgatgcaggccgaggayacctctcaccacacagctcccatgtctgttccagagccccatgcagccacagcgtcacctcccacagatgggacaactcgatactctgcacagacagaca

SEQ ID NO: 8789 - DNA, 201 bp, Homo sapiens
tccctctctgtcctcagcgtgccctccccagacactgccaaccaagagcctacccccaagtctccctgtggcctgacagaacagtacctacacaaagaccrttggccagaggtatctccagaagacacccagtcactttctctgtcagaagagagtcccagcaaggagacctccctggatgtctcttctaagcagctctct

SEQ ID NO: 8790 - DNA, 201 bp, Homo sapiens
agaagaaaaagacaaggccctggaacagaaggataagattccagaagagaaagacaaagccttagaacaaaaggatacagccctggaacagaaggacaagrccctggaaccaaaagataaagacttggaacaaaaggacagggtcctagaacagaaggagaagatcccagaagagaaagacaaagccttagatcaaaaagt

SEQ ID NO: 8791 - DNA, 201 bp, Homo sapiens
ccctctctgtcctcagcgtgccctccccagacactgccaaccaagagcctacccccaagtctccctgtggcctgacagaacagtacctacacaaagaccgktggccagaggtatctccagaagacacccagtcactttctctgtcagaagagagtcccagcaaggagacctccctggatgtctcttctaagcagctctctc

SEQ ID NO: 8792 - DNA, 201 bp, Homo sapiens
tggaagagaaccaccaaactcaggagcaggagagcctagtgcaggaggataaaaccaggaaaccaaagatgctagaggaaaaatccccagaaaaggtcaasgccatggaagagaagttagaagctcttctggagaagaccaaagctctgggcctggaagagagcctagtgcaggagggcagggccagagagcaggaagaaa

SEQ ID NO: 8793 - DNA, 201 bp, Homo sapiens
caagccagcgtcccctgcacggcgtctggatcttcggggaaaacgctcacccacccctggtaaagggcctgcagatcgagcatcccgggccccacctcgaycacgcagcaccacaagccaggtcaccccagcagaggaaaaggatggacacagccccatgtccaaaggcctagtcaatggactcaaggcaggaccaatggc

SEQ ID NO: 8794 - DNA, 201 bp, Homo sapiens
tcaagccagggcctgaagagggcacactagagaaggaagagaaagttcctcctcccaggagcccccaggcccaggaagcacctgtcaacattgatgagggrcttacaggctgtaccattcaactgttgccagcacaggataaagcaatagtctttgagattatggaggcaggagagcccacaggcccaattctgggagcag

SEQ ID NO: 8795 - DNA, 201 bp, Homo sapiens
accttcaggaaatgggaagtacttacctggggcgatcacaagccctgatgaacacattctgacacctgatagctccttctccaagagtcctgagtctttgmcaggccctgccttggaggacattgccataaagtgggaagataaagttccagggttgaaagacagaacctcagaacagaagaaggaacctgagccaaagga

SEQ ID NO: 8796 - DNA, 201 bp, Homo sapiens
agaccaaagctctgggcctggaagagagcctagtgcaggagggcagggccagagagcaggaagaaaagtactggagggggcaggatgtggtccaggagtgkcaagaaacatctcctaccagagaggagccggctggagaacagaaagagcttgccccggcatgggaggacacatctcctgagcaggacaataggtattgga

SEQ ID NO: 8797 - DNA, 201 bp, Homo sapiens
cgtgagcaagttggccaaacgggaggaggtggtagaagagggagccaaggaggcacgttcagagctggccaaggagttagccaagacagagaagaaggcamaagagtcatctgagaagcccccagagaagcctgccaagcctgagagggtgaagacagagtcaagtgaggcactgaaggcagagaagcgaaagctgatcaa

SEQ ID NO: 8798 - DNA, 201 bp, Homo sapiens
agagcaggaagaaaagtactggagggggcaggatgtggtccaggagtggcaagaaacatctcctaccagagaggagccggctggagaacagaaagagcttrccccggcatgggaggacacatctcctgagcaggacaataggtattggaggggcagagaggatgtggccttggaacaggacacatactggagggagctaag

SEQ ID NO: 8799 - DNA, 201 bp, Homo sapiens
aaacccgctcttggacagaggatctgggaggtggaagccaggccagaggacttggggaaaatgagatggaggaaggaaaaagggagaagctgagccacagsttaactcctacagagtgaaatgaaaacgggctgaaaataccaccccaggagaggacctcgccccaagcaagccagtgagcagccctgccagactactgcc

SEQ ID NO: 8800 - DNA, 201 bp, Homo sapiens
cgcagggccccaggcaaggccaagccagcgtcccctgcacggcgtctggatcttcggggaaaacgctcacccacccctggtaaagggcctgcagatcgagyatcccgggccccacctcgaccacgcagcaccacaagccaggtcaccccagcagaggaaaaggatggacacagccccatgtccaaaggcctagtcaatgga

SEQ ID NO: 8801 - DNA, 201 bp, Homo sapiens
gcccagataggaggtccccatcccccaaggaatcaggccggagtcactgggatgacagcactagtgactcagaactggagaagggggctcgggaacagccmgaaaaagaggcccaatccccaagtcctcctcaccccattcctatggggtcccccacattatggccagaaactgaggcacatgttagccctcccttggact

SEQ ID NO: 8802 - DNA, 201 bp, Homo sapiens
ggataaaaccaggaaaccaaagatgctagaggaaaaatccccagaaaaggtcaaggccatggaagagaagttagaagctcttctggagaagaccaaagctstgggcctggaagagagcctagtgcaggagggcagggccagagagcaggaagaaaagtactggagggggcaggatgtggtccaggagtggcaagaaacatc

SEQ ID NO: 8803 - DNA, 201 bp, Homo sapiens
atatcctgaccgaagcctctctcctgaagatgcagaatccctctctgtcctcagcgtgccctccccagacactgccaaccaagagcctacccccaagtctycctgtggcctgacagaacagtacctacacaaagaccgttggccagaggtatctccagaagacacccagtcactttctctgtcagaagagagtcccagcaa

SEQ ID NO: 8804 - DNA, 201 bp, Homo sapiens
cctcagaggtcaaaggccagaggaccctttgccaccagagtgagatcctagagaccatcatcctggtaaatcccagtgcagacagcatcagctctgaggtwcatcatcttcttagcagctcatcagcttataaactactaatcttgagtgggcaaagtttagagcctgggggagacctcatcctacagagtggcacctact

SEQ ID NO: 8805 - DNA, 201 bp, Homo sapiens
aaggccagaggaccctttgccaccagagtgagatcctagagaccatcatcctggtaaatcccagtgcagacagcatcagctctgaggttcatcatcttctkagcagctcatcagcttataaactactaatcttgagtgggcaaagtttagagcctgggggagacctcatcctacagagtggcacctactcatatgaaaact

SEQ ID NO: 8806 - DNA, 201 bp, Homo sapiens
gcagctcatcagcttataaactactaatcttgagtgggcaaagtttagagcctgggggagacctcatcctacagagtggcacctactcatatgaaaacttkgcccaggtccttcacaaccccgagatttcccaattgctcagcaatagagaccctgggatacaggccttccttaccgtgtcctgcttaggggaaggtgatt

SEQ ID NO: 8807 - DNA, 201 bp, Homo sapiens
ggatgggtctcagagagcaacctcctccctcgtagagggagattatatccccaactccagggacctctttatctcaatctatttatttggcatcctgggarggatttccaatagtaatttatgtgacctggggcaggataccgtcagtgaggtgcccagagctgcaccctttcctccatttcccatcccccatctcctcaa

SEQ ID NO: 8808 - DNA, 201 bp, Homo sapiens
taccaaacctgagctcaagaagatttccaagccagacctaaagccctttactcctgaggtacgtaagaccctctataaagccaaggtccctggaagagtcmaaatagacaggagccgtgctatccgtggggagaaggagctgtcttctgagccccagacacccccagcccagaagggaactgtaccactcccaaccatcag

SEQ ID NO: 8809 - DNA, 201 bp, Homo sapiens
cagtgaagatggcttctcctccaccatctggcccacccagtgccacccacacaccctttcatcagtccccagtggaagaaaagtctgagccccaagacttycaggaggcagactcctggggagacactaagcgcacaccaggtgtgggcaaagaagatgctgctgaggagacagtcaagccagggcctgaagagggcacac

SEQ ID NO: 8810 - DNA, 201 bp, Homo sapiens
tgagatcatctcccctccagcttccccacctgagatggttggacaaagggttccttcagccccaggacaagagagtcctatcccagaccctaagctcatgscacacatgaagaatgaacccactactccctcatggctggctgacatcccaccctgggtgcccaaggacagacccctcccccctgcacccctctccccagc

SEQ ID NO: 8811 - DNA, 201 bp, Homo sapiens
ccaggagtggcaagaaacatctcctaccagagaggagccggctggagaacagaaagagcttgccccggcatgggaggacacatctcctgagcaggacaatmggtattggaggggcagagaggatgtggccttggaacaggacacatactggagggagctaagctgtgagcggaaggtctggttccctcacgagctggatgg

SEQ ID NO: 8812 - DNA, 201 bp, Homo sapiens
cagagaggagccggctggagaacagaaagagcttgccccggcatgggaggacacatctcctgagcaggacaataggtattggaggggcagagaggatgtgbccttggaacaggacacatactggagggagctaagctgtgagcggaaggtctggttccctcacgagctggatggccagggggcccgcccacactacactga

SEQ ID NO: 8813 - DNA, 201 bp, Homo sapiens
aggtattggaggggcagagaggatgtggccttggaacaggacacatactggagggagctaagctgtgagcggaaggtctggttccctcacgagctggatgkccagggggcccgcccacactacactgaggaacgggaaagcactttcctagatgagggcccagatgatgagcaagaagtacccctgcgggaacacgcaacc

SEQ ID NO: 8814 - DNA, 201 bp, Homo sapiens
gctgaggagacagtcaagccagggcctgaagagggcacactagagaaggaagagaaagttcctcctcccaggagcccccaggcccaggaagcacctgtcarcattgatgaggggcttacaggctgtaccattcaactgttgccagcacaggataaagcaatagtctttgagattatggaggcaggagagcccacaggccca

SEQ ID NO: 8815 - DNA, 201 bp, Homo sapiens
agcccccaggcccaggaagcacctgtcaacattgatgaggggcttacaggctgtaccattcaactgttgccagcacaggataaagcaatagtctttgagaytatggaggcaggagagcccacaggcccaattctgggagcagaagcccttcccggaggtttgaggactttaccccaagaacctggcaaacctcagaaagat

SEQ ID NO: 8816 - DNA, 201 bp, Homo sapiens
gaaccagctgcccacagcctctgggacctcactcctctgagcccagcacccccagcttcactggacttggccctagctccagctccaagcctgcctggagwcatgggtgatggcatcctgccgtgccacctggagtgctcagaggcagccacggagaagccaagccccttccaggttccctctgaggattgtgcagccaat

SEQ ID NO: 8817 - DNA, 201 bp, Homo sapiens
ccttggaacaggacacatactggagggagctaagctgtgagcggaaggtctggttccctcacgagctggatggccagggggcccgcccacactacactgargaacgggaaagcactttcctagatgagggcccagatgatgagcaagaagtacccctgcgggaacacgcaacccggagcccctgggcctcagacttcaagg

SEQ ID NO: 8818 - DNA, 201 bp, Homo sapiens; identical to SEQ ID NO: 8748

SEQ ID NO: 8819 - DNA, 201 bp, Homo sapiens; identical to SEQ ID NO: 8749

SEQ ID NO: 8820 - DNA, 201 bp, Homo sapiens; identical to SEQ ID NO: 8750

SEQ ID NO: 8821 - DNA, 201 bp, Homo sapiens; identical to SEQ ID NO: 8751

SEQ ID NO: 8822 - DNA, 201 bp, Homo sapiens; identical to SEQ ID NO: 8752

SEQ ID NO: 8823 - DNA, 201 bp, Homo sapiens; identical to SEQ ID NO: 8753

SEQ ID NO: 8824 - DNA, 201 bp, Homo sapiens; identical to SEQ ID NO: 8754

SEQ ID NO: 8825 - DNA, 201 bp, Homo sapiens; identical to SEQ ID NO: 8755

SEQ ID NO: 8826 - DNA, 201 bp, Homo sapiens; identical to SEQ ID NO: 8756

SEQ ID NO: 8827 - DNA, 201 bp, Homo sapiens; identical to SEQ ID NO: 8757

SEQ ID NO: 8828 - DNA, 201 bp, Homo sapiens; identical to SEQ ID NO: 8758

SEQ ID NO: 8829 - DNA, 201 bp, Homo sapiens; identical to SEQ ID NO: 8759

SEQ ID NO: 8830 - DNA, 201 bp, Homo sapiens; identical to SEQ ID NO: 8760

SEQ ID NO: 8831 - DNA, 201 bp, Homo sapiens; identical to SEQ ID NO: 8761

SEQ ID NO: 8832 - DNA, 201 bp, Homo sapiens; identical to SEQ ID NO: 8762

SEQ ID NO: 8833 - DNA, 201 bp, Homo sapiens; identical to SEQ ID NO: 8763

SEQ ID NO: 8834 - DNA, 201 bp, Homo sapiens; identical to SEQ ID NO: 8764

SEQ ID NO: 8835 - DNA, 201 bp, Homo sapiens; identical to SEQ ID NO: 8765

SEQ ID NO: 8836 - DNA, 201 bp, Homo sapiens; identical to SEQ ID NO: 8766

SEQ ID NO: 8837 - DNA, 201 bp, Homo sapiens; identical to SEQ ID NO: 8767

SEQ ID NO: 8838 - DNA, 201 bp, Homo sapiens; identical to SEQ ID NO: 8768

SEQ ID NO: 8839 - DNA, 201 bp, Homo sapiens; identical to SEQ ID NO: 8769

SEQ ID NO: 8840 - DNA, 201 bp, Homo sapiens; identical to SEQ ID NO: 8770

SEQ ID NO: 8841 - DNA, 201 bp, Homo sapiens; identical to SEQ ID NO: 8771

SEQ ID NO: 8842 - DNA, 201 bp, Homo sapiens; identical to SEQ ID NO: 8772

SEQ ID NO: 8843 - DNA, 201 bp, Homo sapiens; identical to SEQ ID NO: 8773

SEQ ID NO: 8844 - DNA, 201 bp, Homo sapiens; identical to SEQ ID NO: 8774

SEQ ID NO: 8845 - DNA, 201 bp, Homo sapiens; identical to SEQ ID NO: 8775

SEQ ID NO: 8846 - DNA, 201 bp, Homo sapiens; identical to SEQ ID NO: 8776

SEQ ID NO: 8847 - DNA, 201 bp, Homo sapiens; identical to SEQ ID NO: 8777

SEQ ID NO: 8848 - DNA, 201 bp, Homo sapiens; identical to SEQ ID NO: 8778

SEQ ID NO: 8849 - DNA, 201 bp, Homo sapiens; identical to SEQ ID NO: 8779

SEQ ID NO: 8850 - DNA, 201 bp, Homo sapiens; identical to SEQ ID NO: 8780

SEQ ID NO: 8851 - DNA, 201 bp, Homo sapiens; identical to SEQ ID NO: 8781

SEQ ID NO: 8852 - DNA, 201 bp, Homo sapiens; identical to SEQ ID NO: 8782

SEQ ID NO: 8853 - DNA, 201 bp, Homo sapiens; identical to SEQ ID NO: 8783

SEQ ID NO: 8854 - DNA, 201 bp, Homo sapiens; identical to SEQ ID NO: 8784

SEQ ID NO: 8855 - DNA, 201 bp, Homo sapiens; identical to SEQ ID NO: 8785

SEQ ID NO: 8856 - DNA, 201 bp, Homo sapiens; identical to SEQ ID NO: 8786

SEQ ID NO: 8857 - DNA, 201 bp, Homo sapiens; identical to SEQ ID NO: 8787

SEQ ID NO: 8858 - DNA, 201 bp, Homo sapiens; identical to SEQ ID NO: 8788

SEQ ID NO: 8859 - DNA, 201 bp, Homo sapiens; identical to SEQ ID NO: 8789

SEQ ID NO: 8860 - DNA, 201 bp, Homo sapiens; identical to SEQ ID NO: 8790

SEQ ID NO: 8861 - DNA, 201 bp, Homo sapiens; identical to SEQ ID NO: 8791

SEQ ID NO: 8862 - DNA, 201 bp, Homo sapiens; identical to SEQ ID NO: 8792

SEQ ID NO: 8863 - DNA, 201 bp, Homo sapiens; identical to SEQ ID NO: 8793

SEQ ID NO: 8864 - DNA, 201 bp, Homo sapiens; identical to SEQ ID NO: 8794

SEQ ID NO: 8865 - DNA, 201 bp, Homo sapiens; identical to SEQ ID NO: 8795

SEQ ID NO: 8866 - DNA, 201 bp, Homo sapiens; identical to SEQ ID NO: 8796

SEQ ID NO: 8867 - DNA, 201 bp, Homo sapiens; identical to SEQ ID NO: 8797

SEQ ID NO: 8868 - DNA, 201 bp, Homo sapiens; identical to SEQ ID NO: 8798

SEQ ID NO: 8869 - DNA, 201 bp, Homo sapiens; identical to SEQ ID NO: 8799

SEQ ID NO: 8870 - DNA, 201 bp, Homo sapiens; identical to SEQ ID NO: 8800

SEQ ID NO: 8871 - DNA, 201 bp, Homo sapiens; identical to SEQ ID NO: 8801

SEQ ID NO: 8872 - DNA, 201 bp, Homo sapiens; identical to SEQ ID NO: 8802

SEQ ID NO: 8873 - DNA, 201 bp, Homo sapiens; identical to SEQ ID NO: 8803

SEQ ID NO: 8874 - DNA, 201 bp, Homo sapiens; identical to SEQ ID NO: 8804

SEQ ID NO: 8875 - DNA, 201 bp, Homo sapiens; identical to SEQ ID NO: 8805

SEQ ID NO: 8876 - DNA, 201 bp, Homo sapiens; identical to SEQ ID NO: 8806

SEQ ID NO: 8877 - DNA, 201 bp, Homo sapiens; identical to SEQ ID NO: 8807

SEQ ID NO: 8878 - DNA, 201 bp, Homo sapiens; identical to SEQ ID NO: 8808

SEQ ID NO: 8879 - DNA, 201 bp, Homo sapiens; identical to SEQ ID NO: 8809

SEQ ID NO: 8880 - DNA, 201 bp, Homo sapiens; identical to SEQ ID NO: 8810

SEQ ID NO: 8881 - DNA, 201 bp, Homo sapiens; identical to SEQ ID NO: 8811

SEQ ID NO: 8882 - DNA, 201 bp, Homo sapiens; identical to SEQ ID NO: 8812

SEQ ID NO: 8883 - DNA, 201 bp, Homo sapiens; identical to SEQ ID NO: 8813

SEQ ID NO: 8884 - DNA, 201 bp, Homo sapiens; identical to SEQ ID NO: 8814

SEQ ID NO: 8885 - DNA, 201 bp, Homo sapiens; identical to SEQ ID NO: 8815

SEQ ID NO: 8886 - DNA, 201 bp, Homo sapiens; identical to SEQ ID NO: 8816

SEQ ID NO: 8887 - DNA, 201 bp, Homo sapiens; identical to SEQ ID NO: 8817

SEQ ID NO: 8888 - DNA, 201 bp, Homo sapiens; identical to SEQ ID NO: 8748

SEQ ID NO: 8889 - DNA, 201 bp, Homo sapiens; identical to SEQ ID NO: 8749

SEQ ID NO: 8890 - DNA, 201 bp, Homo sapiens; identical to SEQ ID NO: 8750

SEQ ID NO: 8891 - DNA, 201 bp, Homo sapiens; identical to SEQ ID NO: 8751

SEQ ID NO: 8892 - DNA, 201 bp, Homo sapiens; identical to SEQ ID NO: 8752

SEQ ID NO: 8893 - DNA, 201 bp, Homo sapiens; identical to SEQ ID NO: 8753

SEQ ID NO: 8894 - DNA, 201 bp, Homo sapiens; identical to SEQ ID NO: 8754

SEQ ID NO: 8895 - DNA, 201 bp, Homo sapiens; identical to SEQ ID NO: 8755

SEQ ID NO: 8896 - DNA, 201 bp, Homo sapiens; identical to SEQ ID NO: 8756

SEQ ID NO: 8897 - DNA, 201 bp, Homo sapiens; identical to SEQ ID NO: 8757

SEQ ID NO: 8898 - DNA, 201 bp, Homo sapiens; identical to SEQ ID NO: 8758

SEQ ID NO: 8899 - DNA, 201 bp, Homo sapiens; identical to SEQ ID NO: 8759

SEQ ID NO: 8900 - DNA, 201 bp, Homo sapiens; identical to SEQ ID NO: 8760

SEQ ID NO: 8901 - DNA, 201 bp, Homo sapiens; identical to SEQ ID NO: 8761

SEQ ID NO: 8902 - DNA, 201 bp, Homo sapiens; identical to SEQ ID NO: 8762

SEQ ID NO: 8903 - DNA, 201 bp, Homo sapiens; identical to SEQ ID NO: 8763

SEQ ID NO: 8904 - DNA, 201 bp, Homo sapiens; identical to SEQ ID NO: 8764

SEQ ID NO: 8905 - DNA, 201 bp, Homo sapiens; identical to SEQ ID NO: 8765

SEQ ID NO: 8906 - DNA, 201 bp, Homo sapiens; identical to SEQ ID NO: 8766

SEQ ID NO: 8907 - DNA, 201 bp, Homo sapiens; identical to SEQ ID NO: 8767

SEQ ID NO: 8908 - DNA, 201 bp, Homo sapiens; identical to SEQ ID NO: 8768

SEQ ID NO: 8909 - DNA, 201 bp, Homo sapiens; identical to SEQ ID NO: 8769

SEQ ID NO: 8910 - DNA, 201 bp, Homo sapiens; identical to SEQ ID NO: 8770

SEQ ID NO: 8911 - DNA, 201 bp, Homo sapiens; identical to SEQ ID NO: 8771

SEQ ID NO: 8912 - DNA, 201 bp, Homo sapiens; identical to SEQ ID NO: 8772

SEQ ID NO: 8913 - DNA, 201 bp, Homo sapiens; identical to SEQ ID NO: 8773

SEQ ID NO: 8914 - DNA, 201 bp, Homo sapiens; identical to SEQ ID NO: 8774

SEQ ID NO: 8915 - DNA, 201 bp, Homo sapiens; identical to SEQ ID NO: 8775

SEQ ID NO: 8916 - DNA, 201 bp, Homo sapiens; identical to SEQ ID NO: 8776

SEQ ID NO: 8917 - DNA, 201 bp, Homo sapiens; identical to SEQ ID NO: 8777

SEQ ID NO: 8918 - DNA, 201 bp, Homo sapiens; identical to SEQ ID NO: 8778

SEQ ID NO: 8919 - DNA, 201 bp, Homo sapiens; identical to SEQ ID NO: 8779

SEQ ID NO: 8920 - DNA, 201 bp, Homo sapiens; identical to SEQ ID NO: 8780

SEQ ID NO: 8921 - DNA, 201 bp, Homo sapiens; identical to SEQ ID NO: 8781

SEQ ID NO: 8922 - DNA, 201 bp, Homo sapiens; identical to SEQ ID NO: 8782

SEQ ID NO: 8923 - DNA, 201 bp, Homo sapiens; identical to SEQ ID NO: 8783

SEQ ID NO: 8924 - DNA, 201 bp, Homo sapiens; identical to SEQ ID NO: 8784

SEQ ID NO: 8925 - DNA, 201 bp, Homo sapiens; identical to SEQ ID NO: 8785

SEQ ID NO: 8926 - DNA, 201 bp, Homo sapiens; identical to SEQ ID NO: 8786

SEQ ID NO: 8927 - DNA, 201 bp, Homo sapiens; identical to SEQ ID NO: 8787

SEQ ID NO: 8928 - DNA, 201 bp, Homo sapiens; identical to SEQ ID NO: 8788

SEQ ID NO: 8929 - DNA, 201 bp, Homo sapiens; identical to SEQ ID NO: 8789

SEQ ID NO: 8930 - DNA, 201 bp, Homo sapiens; identical to SEQ ID NO: 8790

SEQ ID NO: 8931 - DNA, 201 bp, Homo sapiens; identical to SEQ ID NO: 8791

SEQ ID NO: 8932 - DNA, 201 bp, Homo sapiens; identical to SEQ ID NO: 8792

SEQ ID NO: 8933 - DNA, 201 bp, Homo sapiens; identical to SEQ ID NO: 8793

SEQ ID NO: 8934 - DNA, 201 bp, Homo sapiens; identical to SEQ ID NO: 8794

SEQ ID NO: 8935 - DNA, 201 bp, Homo sapiens; identical to SEQ ID NO: 8795

SEQ ID NO: 8936 - DNA, 201 bp, Homo sapiens; identical to SEQ ID NO: 8796

SEQ ID NO: 8937 - DNA, 201 bp, Homo sapiens; identical to SEQ ID NO: 8797

SEQ ID NO: 8938 - DNA, 201 bp, Homo sapiens; identical to SEQ ID NO: 8798

SEQ ID NO: 8939 - DNA, 201 bp, Homo sapiens; identical to SEQ ID NO: 8799

SEQ ID NO: 8940 - DNA, 201 bp, Homo sapiens; identical to SEQ ID NO: 8800

SEQ ID NO: 8941 - DNA, 201 bp, Homo sapiens; identical to SEQ ID NO: 8801

SEQ ID NO: 8942 - DNA, 201 bp, Homo sapiens; identical to SEQ ID NO: 8802

SEQ ID NO: 8943 - DNA, 201 bp, Homo sapiens; identical to SEQ ID NO: 8803

SEQ ID NO: 8944 - DNA, 201 bp, Homo sapiens; identical to SEQ ID NO: 8804

SEQ ID NO: 8945 - DNA, 201 bp, Homo sapiens; identical to SEQ ID NO: 8805

SEQ ID NO: 8946 - DNA, 201 bp, Homo sapiens; identical to SEQ ID NO: 8806

SEQ ID NO: 8947 - DNA, 201 bp, Homo sapiens; identical to SEQ ID NO: 8807

SEQ ID NO: 8948 - DNA, 201 bp, Homo sapiens; identical to SEQ ID NO: 8808

SEQ ID NO: 8949 - DNA, 201 bp, Homo sapiens; identical to SEQ ID NO: 8809

SEQ ID NO: 8950 - DNA, 201 bp, Homo sapiens; identical to SEQ ID NO: 8810

SEQ ID NO: 8951 - DNA, 201 bp, Homo sapiens; identical to SEQ ID NO: 8811

SEQ ID NO: 8952 - DNA, 201 bp, Homo sapiens; identical to SEQ ID NO: 8812

SEQ ID NO: 8953 - DNA, 201 bp, Homo sapiens; identical to SEQ ID NO: 8813

SEQ ID NO: 8954 - DNA, 201 bp, Homo sapiens; identical to SEQ ID NO: 8814

SEQ ID NO: 8955 - DNA, 201 bp, Homo sapiens; identical to SEQ ID NO: 8815

SEQ ID NO: 8956 - DNA, 201 bp, Homo sapiens; identical to SEQ ID NO: 8816

SEQ ID NO: 8957 - DNA, 201 bp, Homo sapiens; identical to SEQ ID NO: 8817

SEQ ID NO: 8958 - DNA, 201 bp, Homo sapiens; identical to SEQ ID NO: 8748

SEQ ID NO: 8959 - DNA, 201 bp, Homo sapiens; identical to SEQ ID NO: 8749

SEQ ID NO: 8960 - DNA, 201 bp, Homo sapiens; identical to SEQ ID NO: 8750

SEQ ID NO: 8961 - DNA, 201 bp, Homo sapiens; identical to SEQ ID NO: 8751

SEQ ID NO: 8962 - DNA, 201 bp, Homo sapiens; identical to SEQ ID NO: 8752

SEQ ID NO: 8963 - DNA, 201 bp, Homo sapiens; identical to SEQ ID NO: 8753

SEQ ID NO: 8964 - DNA, 201 bp, Homo sapiens; identical to SEQ ID NO: 8754

SEQ ID NO: 8965 - DNA, 201 bp, Homo sapiens; identical to SEQ ID NO: 8755

SEQ ID NO: 8966 - DNA, 201 bp, Homo sapiens; identical to SEQ ID NO: 8756

SEQ ID NO: 8967 - DNA, 201 bp, Homo sapiens; identical to SEQ ID NO: 8757

SEQ ID NO: 8968 - DNA, 201 bp, Homo sapiens; identical to SEQ ID NO: 8758

SEQ ID NO: 8969 - DNA, 201 bp, Homo sapiens; identical to SEQ ID NO: 8759

SEQ ID NO: 8970 - DNA, 201 bp, Homo sapiens; identical to SEQ ID NO: 8760

SEQ ID NO: 8971 - DNA, 201 bp, Homo sapiens; identical to SEQ ID NO: 8761

SEQ ID NO: 8972 - DNA, 201 bp, Homo sapiens; identical to SEQ ID NO: 8762

SEQ ID NO: 8973 - DNA, 201 bp, Homo sapiens; identical to SEQ ID NO: 8763

SEQ ID NO: 8974 - DNA, 201 bp, Homo sapiens; identical to SEQ ID NO: 8764

SEQ ID NO: 8975 - DNA, 201 bp, Homo sapiens; identical to SEQ ID NO: 8765

SEQ ID NO: 8976 - DNA, 201 bp, Homo sapiens; identical to SEQ ID NO: 8766

SEQ ID NO: 8977 - DNA, 201 bp, Homo sapiens; identical to SEQ ID NO: 8767

SEQ ID NO: 8978 - DNA, 201 bp, Homo sapiens; identical to SEQ ID NO: 8768

SEQ ID NO: 8979 - DNA, 201 bp, Homo sapiens; identical to SEQ ID NO: 8769

SEQ ID NO: 8980 - DNA, 201 bp, Homo sapiens; identical to SEQ ID NO: 8770

SEQ ID NO: 8981 - DNA, 201 bp, Homo sapiens; identical to SEQ ID NO: 8771

SEQ ID NO: 8982 - DNA, 201 bp, Homo sapiens; identical to SEQ ID NO: 8772

SEQ ID NO: 8983 - DNA, 201 bp, Homo sapiens; identical to SEQ ID NO: 8773

SEQ ID NO: 8984 - DNA, 201 bp, Homo sapiens; identical to SEQ ID NO: 8774

SEQ ID NO: 8985 - DNA, 201 bp, Homo sapiens; identical to SEQ ID NO: 8775

SEQ ID NO: 8986 - DNA, 201 bp, Homo sapiens; identical to SEQ ID NO: 8776

SEQ ID NO: 8987 - DNA, 201 bp, Homo sapiens; identical to SEQ ID NO: 8777

SEQ ID NO: 8988 - DNA, 201 bp, Homo sapiens; identical to SEQ ID NO: 8778

SEQ ID NO: 8989 - DNA, 201 bp, Homo sapiens; identical to SEQ ID NO: 8779

SEQ ID NO: 8990 - DNA, 201 bp, Homo sapiens; identical to SEQ ID NO: 8780

SEQ ID NO: 8991 - DNA, 201 bp, Homo sapiens; identical to SEQ ID NO: 8781

SEQ ID NO: 8992 - DNA, 201 bp, Homo sapiens; identical to SEQ ID NO: 8782

SEQ ID NO: 8993 - DNA, 201 bp, Homo sapiens; identical to SEQ ID NO: 8783

SEQ ID NO: 8994 - DNA, 201 bp, Homo sapiens; identical to SEQ ID NO: 8784

SEQ ID NO: 8995 - DNA, 201 bp, Homo sapiens; identical to SEQ ID NO: 8785

SEQ ID NO: 8996 - DNA, 201 bp, Homo sapiens; identical to SEQ ID NO: 8786

SEQ ID NO: 8997 - DNA, 201 bp, Homo sapiens; identical to SEQ ID NO: 8787

SEQ ID NO: 8998 - DNA, 201 bp, Homo sapiens; identical to SEQ ID NO: 8788

SEQ ID NO: 8999 - DNA, 201 bp, Homo sapiens; identical to SEQ ID NO: 8789

SEQ ID NO: 9000 - DNA, 201 bp, Homo sapiens; identical to SEQ ID NO: 8790

SEQ ID NO: 9001 - DNA, 201 bp, Homo sapiens; identical to SEQ ID NO: 8791

SEQ ID NO: 9002 - DNA, 201 bp, Homo sapiens; identical to SEQ ID NO: 8792

SEQ ID NO: 9003 - DNA, 201 bp, Homo sapiens; identical to SEQ ID NO: 8793

SEQ ID NO: 9004 - DNA, 201 bp, Homo sapiens; identical to SEQ ID NO: 8794

SEQ ID NO: 9005 - DNA, 201 bp, Homo sapiens; identical to SEQ ID NO: 8795

SEQ ID NO: 9006 - DNA, 201 bp, Homo sapiens; identical to SEQ ID NO: 8796

SEQ ID NO: 9007 - DNA, 201 bp, Homo sapiens; identical to SEQ ID NO: 8797

SEQ ID NO: 9008 - DNA, 201 bp, Homo sapiens; identical to SEQ ID NO: 8798

SEQ ID NO: 9009 - DNA, 201 bp, Homo sapiens; identical to SEQ ID NO: 8799

SEQ ID NO: 9010 - DNA, 201 bp, Homo sapiens; identical to SEQ ID NO: 8800

SEQ ID NO: 9011 - DNA, 201 bp, Homo sapiens; identical to SEQ ID NO: 8801

SEQ ID NO: 9012 - DNA, 201 bp, Homo sapiens; identical to SEQ ID NO: 8802

SEQ ID NO: 9013 - DNA, 201 bp, Homo sapiens; identical to SEQ ID NO: 8803

SEQ ID NO: 9014 - DNA, 201 bp, Homo sapiens
ctcctacaccccagggccagaggaccctttgccaccagagtgagatcctagagaccatcatcctggtaaatcccagtgcagacagcatcagctctgaggtwcatcatcttcttagcagctcatcagcttataaactactaatcttgagtgggcaaagtttagagcctgggggagacctcatcctacagagtggcacctact

SEQ ID NO: 9015 - DNA, 201 bp, Homo sapiens
agggccagaggaccctttgccaccagagtgagatcctagagaccatcatcctggtaaatcccagtgcagacagcatcagctctgaggttcatcatcttctkagcagctcatcagcttataaactactaatcttgagtgggcaaagtttagagcctgggggagacctcatcctacagagtggcacctactcatatgaaaact

SEQ ID NO: 9016 - DNA, 201 bp, Homo sapiens; identical to SEQ ID NO: 8806

SEQ ID NO: 9017 - DNA, 201 bp, Homo sapiens; identical to SEQ ID NO: 8808

SEQ ID NO: 9018 - DNA, 201 bp, Homo sapiens; identical to SEQ ID NO: 8807

SEQ ID NO: 9019 - DNA, 201 bp, Homo sapiens; identical to SEQ ID NO: 8809

SEQ ID NO: 9020 - DNA, 201 bp, Homo sapiens; identical to SEQ ID NO: 8810

SEQ ID NO: 9021 - DNA, 201 bp, Homo sapiens; identical to SEQ ID NO: 8811

SEQ ID NO: 9022 - DNA, 201 bp, Homo sapiens; identical to SEQ ID NO: 8812

SEQ ID NO: 9023 - DNA, 201 bp, Homo sapiens; identical to SEQ ID NO: 8813

SEQ ID NO: 9024 - DNA, 201 bp, Homo sapiens; identical to SEQ ID NO: 8814

SEQ ID NO: 9025 - DNA, 201 bp, Homo sapiens; identical to SEQ ID NO: 8815

SEQ ID NO: 9026 - DNA, 201 bp, Homo sapiens; identical to SEQ ID NO: 8816

SEQ ID NO: 9027 - DNA, 201 bp, Homo sapiens; identical to SEQ ID NO: 8817

SEQ ID NO: 9028 - DNA, 151 bp, Homo sapiens
attccctgctatcgtggagattgtgttttaaccaggttttaaatgtgtcttgtgtgtaactggattccttgcatggatcttgtatatagttttatttgctkaacttttatgataaaataaatgttgaatctctttggttgtagtaactggg

SEQ ID NO: 9029 - DNA, 201 bp, Homo sapiens
catgtgctgagaatagattagacaccaaggaagaaaagagtgtagaatatgaaggagatctgaaatcagggactgcagaaacagaacctgtagagcaagaytcttcacagccttccttacctttagtgagagcagatgatcctttaagacttgaccaggagttgcagcagccccaaactcaggagaaaacaagtaattcat

SEQ ID NO: 9030 - DNA, 201 bp, Homo sapiens
ctactccttcaagggaggaaggtgggtgttctttggcttccactcctgccaccactctgcatctcctgcagctctctggtcagaggtcccttgttcaggasagtctttccacgaattcttcagatcttgttgctccttctcctgatgctttccgatctactccttttatcgttcctagcagtcccacagagcaagaaggga

SEQ ID NO: 9031 - DNA, 201 bp, Homo sapiens
tcacagaaagtcctcgtgcctccatgggagttctctcaggcaaaagaaaacttatcacttctgaagaggaacggtcccctgccaagcgaggtcgcaagtcwgccacagtaaaacctggtgcagtaggggcaggagagtttgtgagcccctgtgagagtggagacaacaccggtgaaccctctgccctggaagagcagagag

SEQ ID NO: 9032 - DNA, 201 bp, Homo sapiens
cagggtctgaggtggaagaaatccctgagacaccttgtgaaagtcaaggagaggaactcaaagaagaaaatatggagagtgttccgttgcacctttctctkactgaaactcagtcccaagggttgtgtcttcaaaaggaaatgccaaaaaaagaatgctcagaagctatggaagttgaaaccagtgtgattagtattgatt

SEQ ID NO: 9033 - DNA, 201 bp, Homo sapiens
gaaatccctgagacaccttgtgaaagtcaaggagaggaactcaaagaagaaaatatggagagtgttccgttgcacctttctctgactgaaactcagtcccragggttgtgtcttcaaaaggaaatgccaaaaaaagaatgctcagaagctatggaagttgaaaccagtgtgattagtattgattcccctcaaaagttggca

SEQ ID NO: 9034 - DNA, 201 bp, Homo sapiens
tagatgcctcctctccaggaaatagctttgtagggctccgtgttgtagccaagtggtcatccaatggctacttttactctgggaaaatcacacgagatgtyggagctgggaagtataaattgctctttgatgatgggtacgaatgtgatgtgttgggcaaagacattctgttatgtgaccccatcccgctggacactgaag

SEQ ID NO: 9035 - DNA, 201 bp, Homo sapiens
agcaagaagggagacaagataagccaatggacacgtcagtgttatctgaagaaggaggagagccttttcagaagaaacttcaaagtggtgaaccagtggarttagaaaacccccctctcctgcctgagtccactgtatcaccacaagcctcaacaccaatatctcagagcacaccagtcttccctcctgggtcacttccta

SEQ ID NO: 9036 - DNA, 201 bp, Homo sapiens
actggaaccagagaaacagctgtgcctggccccttgggcatagaggacatttcacctaacttgtcaccagatgataaatccttcagccgtgtcgtgccccragtgccagactccaccagacgaacagatgtgggtgctggtgctttgcgtcgtagtgactctccagaaattcctttccaggctgctgctggcccttctgat

SEQ ID NO: 9037 - DNA, 201 bp, Homo sapiens
agtcgctccatagccagggagaagaagagtttgatatgcctcagcctccacatggccatgtcttacatcgtcacatgagaacaatccgggaagtacgcacrcttgtcactcgtgtcattacagatgtgtattatgtggatggaacagaagtagaaagaaaagtaactgaggagactgaagagccaattgtagagtgtcagg

SEQ ID NO: 9038 - DNA, 201 bp, Homo sapiens
tagcagtcccacagagcaagaagggagacaagataagccaatggacacgtcagtgttatctgaagaaggaggagagccttttcagaagaaacttcaaagtrgtgaaccagtggagttagaaaacccccctctcctgcctgagtccactgtatcaccacaagcctcaacaccaatatctcagagcacaccagtcttccctcc

SEQ ID NO: 9039 - DNA, 201 bp, Homo sapiens
tgcttcccagaagatggtcatacaagggccatccagtcctcaaggagaggcaatggtgacagatgtgctagaagaccagaaagaaggacggagtactaatmaggaaaatcctagtaaggccttgattgaaaggcccagccaaaataacataggaatccaaaccatggagtgttccttgagggtcccagaaactgtttcagc

SEQ ID NO: 9040 - DNA, 201 bp, Homo sapiens
agctcagatgcagaggcccagaagctggggaagccctctgcccatgcctcacaaagcttctgtgaaagttctagtgaaaccccatttcatttcactttgcytaaagaaggtgatatcatcccaccattgactggtgcaaccccacctcttattgggcacctaaaattggagcccaagagacacagtactcctattggtatt

SEQ ID NO: 9041 - DNA, 201 bp, Homo sapiens
taaggccttgattgaaaggcccagccaaaataacataggaatccaaaccatggagtgttccttgagggtcccagaaactgtttcagcagcaacccagactrtaaagaatgtgtgtgagcaggggaccagtacagtggaccagaactttggaaagcaagatgccacagttcagactgagagggggagtggtgagaaaccagt

SEQ ID NO: 9042 - DNA, 201 bp, Homo sapiens
ctcggaccactggaaccagagaaacagctgtgcctggccccttgggcatagaggacatttcacctaacttgtcaccagatgataaatccttcagccgtgtygtgccccgagtgccagactccaccagacgaacagatgtgggtgctggtgctttgcgtcgtagtgactctccagaaattcctttccaggctgctgctggcc

SEQ ID NO: 9043 - DNA, 201 bp, Homo sapiens
actggccagctctcaccagcggtgtctggggaagtagttctctttgtatgaagcatacctgtgccagagctgtggttgaggaggagccagttttaggttcraagaagccattggctcctcacttagccattagacttgaataggatttccttggggtgggttggtctgtcattacccagccttctctgagcatcctaggaa

SEQ ID NO: 9044 - DNA, 201 bp, Homo sapiens
aggttttgccatgttggccaggctggtttagagctcctgacctcaagtgatctgcctgcctcggcctcccaaagtgctgggattacaggcgtgagccaccrcacccagccagacagcagtggcccttctagcactgtgtccagtgctggtccttcttcccctactacagtagatggtaactcccaatttggcttcagtgat

SEQ ID NO: 9045 - DNA, 157 bp, Homo sapiens
ttccctggcaggggccctcgtggcttctcattttccattcccttcactgtggctaaggggtggggtgaggggatggagagggagggctgcctaccatggtytggggcttgaggaagatgagtttgttgatttaaataaagaatttgtcatttttgaa

SEQ ID NO: 9046 - DNA, 201 bp, Homo sapiens
tcaccacccagtgccgaaaggatgtgggccggccccagcctggacgcgagaacttccagaactggctcaaggatggcacggtgctatgtgagctcattaaygcactgtaccccgaggggcaggccccagtaaagaagatccaggcctccaccatggccttcaagcagatggagcagatctctcagttcctgcaagcagctg

SEQ ID NO: 9047 - DNA, 155 bp, Homo sapiens
ggctgggcagggcgcaccacttgcagctgcagcccttgccttgagtcagtgcgcygctctccagcccgcttgaacgctccccgcagccaccgccacccattggaatggccaacaggggacctgcatatggcctgagccgggaggtgcagcagaag

SEQ ID NO: 9048 - DNA, 157 bp, Homo sapiens; identical to SEQ ID NO: 9045

SEQ ID NO: 9049 - DNA, 201 bp, Homo sapiens; identical to SEQ ID NO: 9046

SEQ ID NO: 9050 - DNA, 157 bp, Homo sapiens; identical to SEQ ID NO: 9045

SEQ ID NO: 9051 - DNA, 201 bp, Homo sapiens; identical to SEQ ID NO: 9046

SEQ ID NO: 9052 - DNA, 155 bp, Homo sapiens; identical to SEQ ID NO: 9047

SEQ ID NO: 9053 - DNA, 159 bp, Homo sapiens
ggtatggaatgtatgtgctgaccccctaggtgagtctggggattggaacagggatcttaggtctgcctctctctctctctctctctctctctctctctctstgtgtgtgtgtgtgtgtgtgaagttttttacaggtgaataaacaaagtttgaaagatg

SEQ ID NO: 9054 - DNA, 201 bp, Homo sapiens
ttgccaggtcctggacccctgctccagtacctgagcctgcccttcttccgagagatgaatgtggatggggactggcccccgcttgaggagcccagccctgytgcacccccagattacatggatacccggcgctgtcccacctcatctttccttcgttctccagaaacccctcctgtatcccccagggaatcacttcctggg

SEQ ID NO: 9055 - DNA, 201 bp, Homo sapiens
ccggctgcctcctgaaccggcgcagggctgcccgccgccgccgcaagcgcctccgccaagatccacctcttatcttctctccgaccgggaagtcagctgcmccctctgctctgggctcaggcagtcctgacagcgtggcgaagctgaagctccagggatccccagtccccagcctgcgccagagtctgctctggggggatc

SEQ ID NO: 9056 - DNA, 158 bp, Homo sapiens
agagtggagccgagcggtgcggagcagatctggtggttctccggagagcagcttcctygggtgttacatgagccaagccctcactgtacagaagagtgagagctgaaacctgttccctgagctgatcagaaggacatcccttggcccctccatctggg

SEQ ID NO: 9057 - DNA, 201 bp, Homo sapiens
atggtgtggtgcctcggcctggccgtcctcagcctggtcatcagccagggggctgacggtcgagggaagcctgaggtggtatcggtggtgggccgggctgrggagagtgtggtgctgggctgtgacctgctgcccccggccggccggccccccctgcatgtcatcgagtggctgcgctttggattcctgcttcccatcttc

SEQ ID NO: 9058 - DNA, 201 bp, Homo sapiens
cgtctccacttccggtctggaggtctacccttcgcgcacgcagctgccgggcctcctgcctcagcccgtgctggccggcgtggtgggcggagtctgctttytgggagtggccgtccttgtgagcatcctggccggctgcctcctgaaccggcgcagggctgcccgccgccgccgcaagcgcctccgccaagatccacctct

SEQ ID NO: 9059 - DNA, 201 bp, Homo sapiens
ggcctcctgcctcagcccgtgctggccggcgtggtgggcggagtctgctttctgggagtggccgtccttgtgagcatcctggccggctgcctcctgaaccsgcgcagggctgcccgccgccgccgcaagcgcctccgccaagatccacctcttatcttctctccgaccgggaagtcagctgcaccctctgctctgggctca

SEQ ID NO: 9060 - DNA, 201 bp, Homo sapiens
cgagaactatgagtgggactcagaattccctggggacatggaattgctggagactttgcacctgggcttggccagctcccggctcagacctgaagctgagmcagagctaggtgtgaagactccagaggagggctgcctcctgaacactgcccatgttactggccctgaggcccgctgtgctgcccttcgggaggaattcct

SEQ ID NO: 9061 - DNA, 201 bp, Homo sapiens
tggccttccgccgccgccgagatgctactagggctcggctaccagcctatcgacagccagtcccccaccccgaacaggccactctgctgtgaacatccctratgtgaggctgtgaaaaggcatatggacctgcaaaggaggcccccaaccagacagacctagtttcaaacgagggcactgcccctgcctgcccctttggtg

SEQ ID NO: 9062 - DNA, 201 bp, Homo sapiens
agcccccttacacagccctggctgactggacactgagggagcggctgctgccaggccttctccctgctgcccctcgaggcagcctcaccagccagagcagygggcgaggcagcgcttcgttcctgcggcccccctccacagccccctctgcaggaggcagctacctcagccctgctccaggagacaccagcagctgggcca

SEQ ID NO: 9063 - DNA, 201 bp, Homo sapiens
gcccggtcctttgactgtagcagcagcagccccagtggggcaccccagcccctctgcattgaagacatcagccctgtggcaccccctccagcagccccacycagtcccttgccaggtcctggacccctgctccagtacctgagcctgcccttcttccgagagatgaatgtggatggggactggcccccgcttgaggagccc

SEQ ID NO: 9064 - DNA, 201 bp, Homo sapiens
actgagggcagcgccacccacgccacccagctgctagtgctaggacccccagtcatcgtggtgccccccaagaacagcacagtcaatgcctcccaggatgyttcattggcctgccatgctgaggcataccctgctaacctcacctacagctggttccaggacaacatcaatgtcttccacattagccgcctgcagccccgg

SEQ ID NO: 9065 - DNA, 201 bp, Homo sapiens
aattcctggccttccgccgccgccgagatgctactagggctcggctaccagcctatcgacagccagtcccccaccccgaacaggccactctgctgtgaacrtccctaatgtgaggctgtgaaaaggcatatggacctgcaaaggaggcccccaaccagacagacctagtttcaaacgagggcactgcccctgcctgcccct

SEQ ID NO: 9066 - DNA, 201 bp, Homo sapiens
cccacgccacccagctgctagtgctaggacccccagtcatcgtggtgccccccaagaacagcacagtcaatgcctcccaggatgtttcattggcctgccaygctgaggcataccctgctaacctcacctacagctggttccaggacaacatcaatgtcttccacattagccgcctgcagccccgggtgcggatcctggtgg

SEQ ID NO: 9067 - DNA, 201 bp, Homo sapiens
tccacattagccgcctgcagccccgggtgcggatcctggtggacgggagcctgcggctgctggccacccagcctgatgatgccggctgctacacctgtgtrcccagcaatggcctcctgcatccaccctcagcctctgcctacctcactgtgctctacccagcccaggtgacagctatgcctcctgagacacccctgccca

SEQ ID NO: 9068 - DNA, 201 bp, Homo sapiens
gggatcctgccggaactcccagcccccacccggatcctccatctagccggggacccttacctctggagcccatttgccggggcccagacgggcgctttgtkatggggcccactgtggcggccccccaggaaaggtcaggccgggagcaggcagaacctcggactccagcccagcgtctggcccggtcctttgactgtagca

SEQ ID NO: 9069 - DNA, 201 bp, Homo sapiens
cccaggaaaggtcaggccgggagcaggcagaacctcggactccagcccagcgtctggcccggtcctttgactgtagcagcagcagccccagtggggcaccycagcccctctgcattgaagacatcagccctgtggcaccccctccagcagccccacccagtcccttgccaggtcctggacccctgctccagtacctgagcc

SEQ ID NO: 9070 - DNA, 201 bp, Homo sapiens
gttacatgagccaagccctcactgtacagaagagtgagagctgaaacctgttccctgagctgatcagaaggacatcccttggcccctccatctgggctccygtggataggaggggctgggtgagcaggccagctgggctatggtgtggtgcctcggcctggccgtcctcagcctggtcatcagccagggggctgacggtcg

SEQ ID NO: 9071 - DNA, 201 bp, Homo sapiens
ctggccggctgcctcctgaaccggcgcagggctgcccgccgccgccgcaagcgcctccgccaagatccacctcttatcttctctccgaccgggaagtcagytgcaccctctgctctgggctcaggcagtcctgacagcgtggcgaagctgaagctccagggatccccagtccccagcctgcgccagagtctgctctggggg

SEQ ID NO: 9072 - DNA, 201 bp, Homo sapiens
tccttgctgagtgccacaacctcctgcctgagcaggacaagatgctggtggctgtcaaggcactgaaggaggcgtccgagagtgctcggcaggacttccarcgtgaggctgagctgctcaccatgctgcagcaccagcacatcgtgcgcttcttcggcgtctgcaccgagggccgccccctgctcatggtctttgagtata

SEQ ID NO: 9073 - DNA, 201 bp, Homo sapiens
gcacatcgtgcgcttcttcggcgtctgcaccgagggccgccccctgctcatggtctttgagtatatgcggcacggggacctcaaccgcttcctccgatccyatggacctgatgccaagctgctggctggtggggaggatgtggctccaggccccctgggtctggggcagctgctggctgtggctagccaggtcgctgcggg

SEQ ID NO: 9074 - DNA, 201 bp, Homo sapiens
ccccctgctcatggtctttgagtatatgcggcacggggacctcaaccgcttcctccgatcccatggacctgatgccaagctgctggctggtggggaggatktggctccaggccccctgggtctggggcagctgctggctgtggctagccaggtcgctgcggggatggtgtacctggcgggtctgcattttgtgcaccggga

SEQ ID NO: 9075 - DNA, 201 bp, Homo sapiens
actggtcctgtcggggaaccctctgcactgttcttgtgccctgcgctggctacagcgctgggaggaggagggactgggcggagtgcctgaacagaagctgyagtgtcatgggcaagggcccctggcccacatgcccaatgccagctgtggtgtgcccacgctgaaggtccaggtgcccaatgcctcggtggatgtggggga

SEQ ID NO: 9076 - DNA, 201 bp, Homo sapiens
tggtctttgagtatatgcggcacggggacctcaaccgcttcctccgatcccatggacctgatgccaagctgctggctggtggggaggatgtggctccaggycccctgggtctggggcagctgctggctgtggctagccaggtcgctgcggggatggtgtacctggcgggtctgcattttgtgcaccgggacctggccacac

SEQ ID NO: 9077 - DNA, 201 bp, Homo sapiens
cctggatagcctccaccacctgcccggcgcagagaacctgactgagctctacatcgagaaccagcagcatctgcagcatctggagctccgtgatctgaggrgcctgggggagctgagaaacctcaccatcgtgaagagtggtctccgtttcgtggcgccagatgccttccatttcactcctcggctcagtcgcctgaatct

SEQ ID NO: 9078 - DNA, 201 bp, Homo sapiens
acatcgagaaccagcagcatctgcagcatctggagctccgtgatctgaggggcctgggggagctgagaaacctcaccatcgtgaagagtggtctccgtttygtggcgccagatgccttccatttcactcctcggctcagtcgcctgaatctctccttcaacgctctggagtctctctcctggaaaactgtgcagggcctct

SEQ ID NO: 9079 - DNA, 201 bp, Homo sapiens
ttaccgtgtgggaggccgcaccatgctgcccattcgctggatgccgcccgagagcatcctgtaccgtaagttcaccaccgagagcgacgtgtggagcttcrgcgtggtgctctgggagatcttcacctacggcaagcagccctggtaccagctctccaacacggaggcaatcgactgcatcacgcagggacgtgagttgga

SEQ ID NO: 9080 - DNA, 201 bp, Homo sapiens
ggagcgcacagacggctgccccgcctgagcgaggcgggcgccgccgcgatgctgcgaggcggacggcgcgggcagcttggctggcacagctgggctgcggrgccgggcagcctgctggcttggctgatactggcatctgcgggcgccgcaccctgccccgatgcctgctgcccccacggctcctcgggactgcgatgcacc

SEQ ID NO: 9081 - DNA, 201 bp, Homo sapiens
tcatcttcactgagttcctggagccggcagccaatgagaccgtgcggcacgggtgtctgcgcctcaaccagcccacccacgtcaacaacggcaactacacrctgctggctgccaaccccttcggccaggcctccgcctccatcatggctgccttcatggacaaccctttcgagttcaaccccgaggaccccatccctgccc

SEQ ID NO: 9082 - DNA, 201 bp, Homo sapiens
agcttcatcttcactgagttcctggagccggcagccaatgagaccgtgcggcacgggtgtctgcgcctcaaccagcccacccacgtcaacaacggcaactrcacgctgctggctgccaaccccttcggccaggcctccgcctccatcatggctgccttcatggacaaccctttcgagttcaaccccgaggaccccatccct

SEQ ID NO: 9083 - DNA, 201 bp, Homo sapiens
ctcctggaaaactgtgcagggcctctccttacaggaactggtcctgtcggggaaccctctgcactgttcttgtgccctgcgctggctacagcgctgggagkaggagggactgggcggagtgcctgaacagaagctgcagtgtcatgggcaagggcccctggcccacatgcccaatgccagctgtggtgtgcccacgctgaa

SEQ ID NO: 9084 - DNA, 201 bp, Homo sapiens
caagggcccctggcccacatgcccaatgccagctgtggtgtgcccacgctgaaggtccaggtgcccaatgcctcggtggatgtgggggacgacgtgctgcygcggtgccaggtggaggggcggggcctggagcaggccggctggatcctcacagagctggagcagtcagccacggtgatgaaatctgggggtctgccatcc

SEQ ID NO: 9085 - DNA, 201 bp, Homo sapiens
caaggcactgaaggaggcgtccgagagtgctcggcaggacttccagcgtgaggctgagctgctcaccatgctgcagcaccagcacatcgtgcgcttcttcsgcgtctgcaccgagggccgccccctgctcatggtctttgagtatatgcggcacggggacctcaaccgcttcctccgatcccatggacctgatgccaagct

SEQ ID NO: 9086 - DNA, 201 bp, Homo sapiens
gcttcatcttcactgagttcctggagccggcagccaatgagaccgtgcggcacgggtgtctgcgcctcaaccagcccacccacgtcaacaacggcaactamacgctgctggctgccaaccccttcggccaggcctccgcctccatcatggctgccttcatggacaaccctttcgagttcaaccccgaggaccccatccctg

SEQ ID NO: 9087 - DNA, 201 bp, Homo sapiens
ccacatcatcgagaacccacaatacttcagtgatgcctgtgttcaccacatcaagcgccgggacatcgtgctcaagtgggagctgggggagggcgcctttsggaaggtcttccttgctgagtgccacaacctcctgcctgagcaggacaagatgctggtggctgtcaaggcactgaaggaggcgtccgagagtgctcggca

SEQ ID NO: 9088 - DNA, 201 bp, Homo sapiens
accgagggccgccccctgctcatggtctttgagtatatgcggcacggggacctcaaccgcttcctccgatcccatggacctgatgccaagctgctggctgktggggaggatgtggctccaggccccctgggtctggggcagctgctggctgtggctagccaggtcgctgcggggatggtgtacctggcgggtctgcatttt

SEQ ID NO: 9089 - DNA, 201 bp, Homo sapiens
tcggcaggacttccagcgtgaggctgagctgctcaccatgctgcagcaccagcacatcgtgcgcttcttcggcgtctgcaccgagggccgccccctgctcrtggtctttgagtatatgcggcacggggacctcaaccgcttcctccgatcccatggacctgatgccaagctgctggctggtggggaggatgtggctccagg

SEQ ID NO: 9090 - DNA, 201 bp, Homo sapiens
caaggatgtgcacgcccggctgcaagccctggcccaggcacctcctgtctacctggatgtcctgggctagggggccggcccaggggctgggagtggttagycggaatactggggcctgccctcagcatcccccatagctcccagcagccccagggtgatctcaaagtatctaattcaccctcagcatgtgggaagggacag

SEQ ID NO: 9091 - DNA, 201 bp, Homo sapiens
ggatgtggctccaggccccctgggtctggggcagctgctggctgtggctagccaggtcgctgcggggatggtgtacctggcgggtctgcattttgtgcacygggacctggccacacgcaactgtctagtgggccagggactggtggtcaagattggtgattttggcatgagcagggatatctacagcaccgactattaccg

SEQ ID NO: 9092 - DNA, 201 bp, Homo sapiens
gtcgggggaggcctggcagctgcagctgggagcgcacagacggctgccccgcctgagcgaggcgggcgccgccgcgatgctgcgaggcggacggcgcgggyagcttggctggcacagctgggctgcggggccgggcagcctgctggcttggctgatactggcatctgcgggcgccgcaccctgccccgatgcctgctgccc

SEQ ID NO: 9093 - DNA, 201 bp, Homo sapiens
ccccctgggtctggggcagctgctggctgtggctagccaggtcgctgcggggatggtgtacctggcgggtctgcattttgtgcaccgggacctggccacaygcaactgtctagtgggccagggactggtggtcaagattggtgattttggcatgagcagggatatctacagcaccgactattaccgtgtgggaggccgcac

SEQ ID NO: 9094 - DNA, 201 bp, Homo sapiens
caccacctgcccggcgcagagaacctgactgagctctacatcgagaaccagcagcatctgcagcatctggagctccgtgatctgaggggcctgggggagcygagaaacctcaccatcgtgaagagtggtctccgtttcgtggcgccagatgccttccatttcactcctcggctcagtcgcctgaatctctccttcaacgct

SEQ ID NO: 9095 - DNA, 201 bp, Homo sapiens
cgtgtgggaggccgcaccatgctgcccattcgctggatgccgcccgagagcatcctgtaccgtaagttcaccaccgagagcgacgtgtggagcttcggcgyggtgctctgggagatcttcacctacggcaagcagccctggtaccagctctccaacacggaggcaatcgactgcatcacgcagggacgtgagttggagcgg

SEQ ID NO: 9096 - DNA, 201 bp, Homo sapiens
ctggtaccagctctccaacacggaggcaatcgactgcatcacgcagggacgtgagttggagcggccacgtgcctgcccaccagaggtctacgccatcatgyggggctgctggcagcgggagccccagcaacgccacagcatcaaggatgtgcacgcccggctgcaagccctggcccaggcacctcctgtctacctggatgt

SEQ ID NO: 9097 - DNA, 201 bp, Homo sapiens
caagcagccctggtaccagctctccaacacggaggcaatcgactgcatcacgcagggacgtgagttggagcggccacgtgcctgcccaccagaggtctacrccatcatgcggggctgctggcagcgggagccccagcaacgccacagcatcaaggatgtgcacgcccggctgcaagccctggcccaggcacctcctgtcta

SEQ ID NO: 9098 - DNA, 201 bp, Homo sapiens
gagcggccacgtgcctgcccaccagaggtctacgccatcatgcggggctgctggcagcgggagccccagcaacgccacagcatcaaggatgtgcacgcccsgctgcaagccctggcccaggcacctcctgtctacctggatgtcctgggctagggggccggcccaggggctgggagtggttagccggaatactggggcctg

SEQ ID NO: 9099 - DNA, 201 bp, Homo sapiens
tcaaggcactgaaggaggcgtccgagagtgctcggcaggacttccagcgtgaggctgagctgctcaccatgctgcagcaccagcacatcgtgcgcttcttyggcgtctgcaccgagggccgccccctgctcatggtctttgagtatatgcggcacggggacctcaaccgcttcctccgatcccatggacctgatgccaagc

SEQ ID NO: 9100 - DNA, 201 bp, Homo sapiens
acctcaaccgcttcctccgatcccatggacctgatgccaagctgctggctggtggggaggatgtggctccaggccccctgggtctggggcagctgctggcygtggctagccaggtcgctgcggggatggtgtacctggcgggtctgcattttgtgcaccgggacctggccacacgcaactgtctagtgggccagggactgg

SEQ ID NO: 9101 - DNA, 201 bp, Homo sapiens
tggccacacgcaactgtctagtgggccagggactggtggtcaagattggtgattttggcatgagcagggatatctacagcaccgactattaccgtgtgggrggccgcaccatgctgcccattcgctggatgccgcccgagagcatcctgtaccgtaagttcaccaccgagagcgacgtgtggagcttcggcgtggtgctct

SEQ ID NO: 9102 - DNA, 201 bp, Homo sapiens; identical to SEQ ID NO: 9072

SEQ ID NO: 9103 - DNA, 201 bp, Homo sapiens; identical to SEQ ID NO: 9073

SEQ ID NO: 9104 - DNA, 201 bp, Homo sapiens; identical to SEQ ID NO: 9074

SEQ ID NO: 9105 - DNA, 201 bp, Homo sapiens; identical to SEQ ID NO: 9076

SEQ ID NO: 9106 - DNA, 201 bp, Homo sapiens; identical to SEQ ID NO: 9077

SEQ ID NO: 9107 - DNA, 201 bp, Homo sapiens; identical to SEQ ID NO: 9078

SEQ ID NO: 9108 - DNA, 201 bp, Homo sapiens; identical to SEQ ID NO: 9079

SEQ ID NO: 9109 - DNA, 201 bp, Homo sapiens; identical to SEQ ID NO: 9080

SEQ ID NO: 9110 - DNA, 201 bp, Homo sapiens
tcatcttcactgagttcctggagccggcagccaatgagaccgtgcggcacgggtgtctgcgcctcaaccagcccacccacgtcaacaacggcaactacacrctgctggctgccaaccccttcggccaggcctccgcctccatcatggctgccttcatggacaaccctttcgagttcaaccccgaggaccccatccctgtct

SEQ ID NO: 9111 - DNA, 201 bp, Homo sapiens; identical to SEQ ID NO: 9082

SEQ ID NO: 9112 - DNA, 201 bp, Homo sapiens; identical to SEQ ID NO: 9084

SEQ ID NO: 9113 - DNA, 201 bp, Homo sapiens; identical to SEQ ID NO: 9085

SEQ ID NO: 9114 - DNA, 201 bp, Homo sapiens; identical to SEQ ID NO: 9087

SEQ ID NO: 9115 - DNA, 201 bp, Homo sapiens; identical to SEQ ID NO: 9088

SEQ ID NO: 9116 - DNA, 201 bp, Homo sapiens; identical to SEQ ID NO: 9089

SEQ ID NO: 9117 - DNA, 201 bp, Homo sapiens; identical to SEQ ID NO: 9090

SEQ ID NO: 9118 - DNA, 201 bp, Homo sapiens; identical to SEQ ID NO: 9091

SEQ ID NO: 9119 - DNA, 201 bp, Homo sapiens; identical to SEQ ID NO: 9093

SEQ ID NO: 9120 - DNA, 201 bp, Homo sapiens; identical to SEQ ID NO: 9094

SEQ ID NO: 9121 - DNA, 201 bp, Homo sapiens; identical to SEQ ID NO: 9095

SEQ ID NO: 9122 - DNA, 201 bp, Homo sapiens; identical to SEQ ID NO: 9096

SEQ ID NO: 9123 - DNA, 201 bp, Homo sapiens; identical to SEQ ID NO: 9097

SEQ ID NO: 9124 - DNA, 201 bp, Homo sapiens; identical to SEQ ID NO: 9098

SEQ ID NO: 9125 - DNA, 201 bp, Homo sapiens; identical to SEQ ID NO: 9099

SEQ ID NO: 9126 - DNA, 201 bp, Homo sapiens; identical to SEQ ID NO: 9100

SEQ ID NO: 9127 - DNA, 201 bp, Homo sapiens; identical to SEQ ID NO: 9101

SEQ ID NO: 9128 - DNA, 198 bp, Homo sapiens
ccacgcctgcgcccatctttcacacacattctggacagcatacaggaggagctgcggccctccttccgcctcctctccttctactacagcccggaatgccsgggggcccggggctccctgcctaccaccgatgcagagcctgactcctcacccactccaagagactgcagccctcaaaatgggggtccagggcactga

SEQ ID NO: 9129 - DNA, 201 bp, Homo sapiens
tctacttccagggtgcctgcctgtgggcctgcccgccaggcacctaccagtatgagtcctggcgctgtgtcacagctgagcgctgtgccagcctgcactcygtgcccggccgtgcctccaccttcggcatacaccagggcagttgcctggcccagtgcccttctggcttcacccgtaatagcagcagcatattctgccaca

SEQ ID NO: 9130 - DNA, 201 bp, Homo sapiens
agatcctgctcatgttcacagccaccggggaggacttccgcggcctcagcttccctcgcctcacccaggtcaccgactacctgctgctcttccgtgtctayggactggagagcctgcgcgacctcttccccaacctagcagtcatccgcgggacgcgcctcttcctgggctatgcactggtcatctttgagatgccacatc

SEQ ID NO: 9131 - DNA, 201 bp, Homo sapiens
gcttctgtgaatccagagtacttcagcgcctctgatagtaggtctgggagtgggtggacaggtggtgtgggaaagggagacaggagaggagcagagacagmcttccagaagaccttcttgcagaagatagccttgggacaagagcccttcagaagaggagaagagaagttgggggtgtatgtccctgatgaatgggaggtg

SEQ ID NO: 9132 - DNA, 139 bp, Homo sapiens
atggcagtgcctagtctgtggccctggggagcatgcctrcctgtgatcttcctctccttgggatttggcctggatacagtagaggtgtgccccagcctggatattcgctcagaggtggcagagcttcgtcagctggaga

SEQ ID NO: 9133 - DNA, 201 bp, Homo sapiens
cagagagtgtgcccctgcccccatgggatggcttgcacagcgaggggcgagtgctgccacaccgaatgcctggggggctgcagccagccagaagaccctcrtgcctgtgtagcttgccgccacctctacttccagggtgcctgcctgtgggcctgcccgccaggcacctaccagtatgagtcctggcgctgtgtcacagct

SEQ ID NO: 9134 - DNA, 198 bp, Homo sapiens; identical to SEQ ID NO: 9128

SEQ ID NO: 9135 - DNA, 201 bp, Homo sapiens; identical to SEQ ID NO: 9129

SEQ ID NO: 9136 - DNA, 201 bp, Homo sapiens; identical to SEQ ID NO: 9130

SEQ ID NO: 9137 - DNA, 139 bp, Homo sapiens; identical to SEQ ID NO: 9132

SEQ ID NO: 9138 - DNA, 201 bp, Homo sapiens; identical to SEQ ID NO: 9133

SEQ ID NO: 9139 - DNA, 201 bp, Homo sapiens
ttgcattagaaccatctggagcacttgttttaaaatgcagattcataggcagcatctcagatctacagaacaagaatctctgctaagtggacctggaatcytccatctgcatcttaacatgctctctaggtgtttcttgtgtttgagaaccatgacttatgactttcctcagaacatgagactgtaaaacaaaaacaaaaa

SEQ ID NO: 9140 - DNA, 201 bp, Homo sapiens
tccattggatcttttactttaaagtagtgatgaaaagtacatgttgatactgtcttagaagaaattaatatattagtgaagccacatggggtttcagttgygaaacaggtctgtttttatgttcagtttgtacaatccacaattcattcaccagatattttgttcttaattgtgaaccaggttagcaaatgacctatcaaa

SEQ ID NO: 9141 - DNA, 201 bp, Homo sapiens
aaatttaggtcagggaaaagaccaagggccagcattgctacttttgtgtgtgtgtgtgtgggttttgttttgtttttttggttggctggttgttttcgttrttgttaacaaaggaatgagaatatgtaatacttaaataaacatgaccacaaagaatgctgttctgatttactagagaatgttcccaatttgaatttaggg

SEQ ID NO: 9142 - DNA, 201 bp, Homo sapiens
ttgttgttaacaaaggaatgagaatatgtaatacttaaataaacatgaccacaaagaatgctgttctgatttactagagaatgttcccaatttgaatttarggtgattttaaagaacagtgagaaagggcatacatccacagattcactttgtttatgcatatgtagatacaaggatgcacatatacacattttcaaggac

SEQ ID NO: 9143 - DNA, 201 bp, Homo sapiens
tggagaagagcttggctctgatgtgcaccaggattctattgttttaacttacctagaaggattactaatgcatcaggcagcagggggatcaggtactgccrttgacaaaaagtctgctgggcataatgaagaggatcagaactttaacatttctggcagtgcatttcccacctgtcaaagtaatggtccagttctcaatac

SEQ ID NO: 9144 - DNA, 201 bp, Homo sapiens
aaagggtactacagcttattgacatcagtaaggtagcattcattacctgtttattctctgctgcatcttacagaagagtaaactggtgagagtatatattttatatatatatatatatatatataatatgtatatatatatatattgacttgttacatgaagatgttaaaatcggtttttaaaggtgatgtaaatagtgat

SEQ ID NO: 9145 - DNA, 201 bp, Homo sapiens
tactggtgatgttgaaatatgcatactaatttttgcttaacattagatgtcatgaggaaactactgaactagcaattggttgtttaacacttctgtatgcrtcagataacaactgtgagtagcctatgaatgaaattcttttataaatattaggcataaattaaaatgtaaaactccattcatagtggattaatgcatttt

SEQ ID NO: 9146 - DNA, 201 bp, Homo sapiens
aagggtactacagcttattgacatcagtaaggtagcattcattacctgtttattctctgctgcatcttacagaagagtaaactggtgagagtatatattttatatatatatatatatatatataatatgtatatatatatatattgacttgttacatgaagatgttaaaatcggtttttaaaggtgatgtaaatagtgatt

SEQ ID NO: 9147 - DNA, 201 bp, Homo sapiens
cactgatgcggagaagaatgagtatgaaaaagactctccaagattgaccaaaaccaacccaatactatattacatgcttcaaaaaggaggcaattctgttrccagtcgagaaacacaagacaaggacatttggagggaggcttcatctgctgaaagtgtctcacaggtcacagccaaagaagagttacttcctactgcaga

SEQ ID NO: 9148 - DNA, 201 bp, Homo sapiens
agggtactacagcttattgacatcagtaaggtagcattcattacctgtttattctctgctgcatcttacagaagagtaaactggtgagagtatatattttatatatatatatatatatatataatatgtatatatatatatattgacttgttacatgaagatgttaaaatcggtttttaaaggtgatgtaaatagtgattt

SEQ ID NO: 9149 - DNA, 201 bp, Homo sapiens
gggtactacagcttattgacatcagtaaggtagcattcattacctgtttattctctgctgcatcttacagaagagtaaactggtgagagtatatattttawatatatatatatatatatataatatgtatatatatatatattgacttgttacatgaagatgttaaaatcggtttttaaaggtgatgtaaatagtgatttc

SEQ ID NO: 9150 - DNA, 201 bp, Homo sapiens
ggtactacagcttattgacatcagtaaggtagcattcattacctgtttattctctgctgcatcttacagaagagtaaactggtgagagtatatattttatatatatatatatatatatataatatgtatatatatatatattgacttgttacatgaagatgttaaaatcggtttttaaaggtgatgtaaatagtgatttcc

SEQ ID NO: 9151 - DNA, 201 bp, Homo sapiens
gatgcctctattttccccaatacagtcacacatcagctcaaaatttgcaatattgtagttcatatattaccgttatgtctttggaaatcgggttcagaacmctttttatgacaaaaattgggtggaggggataactttcatatctggctcaacatctcaggaaaatctgtgattatttgtgtgttctaatgagtaacatct

SEQ ID NO: 9152 - DNA, 201 bp, Homo sapiens
attgactaaataaaaagtacaaagggcacatatacgtgacagaattgtacacaatcactccattggatcttttactttaaagtagtgatgaaaagtacatrttgatactgtcttagaagaaattaatatattagtgaagccacatggggtttcagttgcgaaacaggtctgtttttatgttcagtttgtacaatccacaat

SEQ ID NO: 9153 - DNA, 201 bp, Homo sapiens
agtgggtattatgcaacatcatggagaagtgaaggcataggcttattctgacataaaattccactggccagttgaatatattctattccatgtccatactmtgacaatcttattgtcaacactatataaataagcttttaaacaagtcatttttcttgatcgttgtggaaggtttggagccttagaggtatgtcagaaaaa

SEQ ID NO: 9154 - DNA, 201 bp, Homo sapiens
aacaaagcttacaacatttagtttaaacccaagaagggcactaaactcagattgactaaataaaaagtacaaagggcacatatacgtgacagaattgtacwcaatcactccattggatcttttactttaaagtagtgatgaaaagtacatgttgatactgtcttagaagaaattaatatattagtgaagccacatggggtt

SEQ ID NO: 9155 - DNA, 201 bp, Homo sapiens
ttggaaacttctcctgaatgcatccttaacctttattaaaaccattgtcctaagaacaatgccaacaaagcttacaacatttagtttaaacccaagaaggrcactaaactcagattgactaaataaaaagtacaaagggcacatatacgtgacagaattgtacacaatcactccattggatcttttactttaaagtagtga

SEQ ID NO: 9156 - DNA, 201 bp, Homo sapiens
tgatgaatattcagataacaatcctagttttacagatgacagcagtggtgatgaaagttcttattccaactgtgttcccatagacttgtcttgcaaacacsgaactgaaaaatcagaatctgaccaacctgtttccctggataacttcactcaatccttgctaaacacttgggatccaaaagtcccagatgtagatatcaa

SEQ ID NO: 9157 - DNA, 201 bp, Homo sapiens
gatacgaatcttcctgatgtgactaaaaacctcatcagagataggtttgcagagtctcctcatcatgttggacaaagtggaacaaaggtcatgagtgaacygttgtcatgtgctgcaagattacaggctgttgcaagcatggtggaaaaaagggctagtcctgccacctcacctaaacctagtgttgcttgtagccagtta

SEQ ID NO: 9158 - DNA, 201 bp, Homo sapiens
tatccaataaaaaaaaacctagtgctgattcacagcttattatccaattcaaaaataaattagaaaaatatatgcttacatttttcacttttgctaaaaaraaaaaaaaaggtgtttatttttaactcttggaagaggttttgtggttcccaatgtgtctgtcccaccctgatccttttcaatatatatttctttaaacct

SEQ ID NO: 9159 - DNA, 201 bp, Homo sapiens
ttgaaagacgtactgtcctccagttgctcctggggaaccccaacaaagggaagagtgaaaaaaaagagaaaactcccttaagagatgaaagtactcaggarcactcagagagagctttaagtgaacaaatactgatggtgaaaataaaatctgagccttgtgatgacttacaaattcctaacacaaatgtgcacttgagcc

SEQ ID NO: 9160 - DNA, 201 bp, Homo sapiens
tactgcagaaacgaaagcttctttctttaatttaagaagcccttacaatagccatatgggaaataatgcttctcgcccacacagcgcaaatggagaagttkatggacttctgggaagcgtgctaacgataaagaaagaatcagaataaaatgtacctgccatccagttttggatctttttaaaactaatgagtatgaactt

SEQ ID NO: 9161 - DNA, 201 bp, Homo sapiens
attctgttaccagtcgagaaacacaagacaaggacatttggagggaggcttcatctgctgaaagtgtctcacaggtcacagccaaagaagagttacttccyactgcagaaacgaaagcttctttctttaatttaagaagcccttacaatagccatatgggaaataatgcttctcgcccacacagcgcaaatggagaagttt

SEQ ID NO: 9162 - DNA, 201 bp, Homo sapiens
ctcagcccagcagttgcatggataacaggacattttcatacccaggtgtagtaaaaactcctgtgagtcctactttccctgagcacttgggctgtgcaggktctagaccagaatctgggcttttgaatgggtgttccatgcccagtgagaaaggacccattaagtgggttatcactgatgcggagaagaatgagtatgaaa

SEQ ID NO: 9163 - DNA, 201 bp, Homo sapiens
ctgggcataatgaagaggatcagaactttaacatttctggcagtgcatttcccacctgtcaaagtaatggtccagttctcaatacacatacatatcagggrtctggcatgctgcacctcaaaaaagccagactgttgcagtcttctgaggactggaatgcagcaaagcggaagaggctgtctgattctatcatgaatttaa

SEQ ID NO: 9164 - DNA, 201 bp, Homo sapiens
acagtaaaaagaaaggacacaaaaataatgtgaccaacagcaaacctgaatttagcatttcttctttaaatggactgatgtacagttccactcagcccagyagttgcatggataacaggacattttcatacccaggtgtagtaaaaactcctgtgagtcctactttccctgagcacttgggctgtgcagggtctagaccag

SEQ ID NO: 9165 - DNA, 201 bp, Homo sapiens
gtgccccattcttgggtatggctcctgctgtgcagagaagcgcacctgccttaccagtgtccgaagactttaaatcggagcctgtttcacctcaggatttytctttctccaagaatggtctgctaagtcgattgctaagacaaaatcaagatagttacctggcagatgattcagacaggagtcacagaaataatgaaatgg

SEQ ID NO: 9166 - DNA, 201 bp, Homo sapiens
tatgcaaggacttctgtgatagaaagccccagtacaaatcggactactccagtgagcactccacctttacttacatcaagcaaagcagggtctcccatcartctctctcaacactctctggtcatcaaatggaattccccaccatatgtctgcagtactcagtctgaaaagctaacaaatactgcatctaaccactcaatg

SEQ ID NO: 9167 - DNA, 201 bp, Homo sapiens
ccagcgaaagtgaacacaggagttgggccagagagagcaaaagctttaatgttctgaaacagctgcttctctcagaaaactgtgtgcgagatttgtccccrcacagaagtaactctgtggctgacagtaaaaagaaaggacacaaaaataatgtgaccaacagcaaacctgaatttagcatttcttctttaaatggactga

SEQ ID NO: 9168 - DNA, 201 bp, Homo sapiens
tgaatattcagataacaatcctagttttacagatgacagcagtggtgatgaaagttcttattccaactgtgttcccatagacttgtcttgcaaacaccgarctgaaaaatcagaatctgaccaacctgtttccctggataacttcactcaatccttgctaaacacttgggatccaaaagtcccagatgtagatatcaaaga

SEQ ID NO: 9169 - DNA, 201 bp, Homo sapiens
tgtgtgtgtgggttttgttttgtttttttggttggctggttgttttcgttgttgttaacaaaggaatgagaatatgtaatacttaaataaacatgaccacraagaatgctgttctgatttactagagaatgttcccaatttgaatttagggtgattttaaagaacagtgagaaagggcatacatccacagattcactttgt

SEQ ID NO: 9170 - DNA, 201 bp, Homo sapiens
tttaggtcagggaaaagaccaagggccagcattgctacttttgtgtgtgtgtgtgtgggttttgttttgtttttttggttggctggttgttttcgttgttrttaacaaaggaatgagaatatgtaatacttaaataaacatgaccacaaagaatgctgttctgatttactagagaatgttcccaatttgaatttagggtga

SEQ ID NO: 9171 - DNA, 201 bp, Homo sapiens
gtcctaagaacaatgccaacaaagcttacaacatttagtttaaacccaagaagggcactaaactcagattgactaaataaaaagtacaaagggcacatatrcgtgacagaattgtacacaatcactccattggatcttttactttaaagtagtgatgaaaagtacatgttgatactgtcttagaagaaattaatatattag

SEQ ID NO: 9172 - DNA, 201 bp, Homo sapiens
gaacacgctttaaaaacgcaaaatgcaaatcaagcagcaagtgaaagacttgctgctatggccagattgcaagaaaatggccagaaggatgttggcagttwccagctcccaaaaggaatgtcaagccatcttaatggtcaggcaagaacatcatcaagcaaactgatggctagcaaaagtagtgctacagtgtttcaaaat

SEQ ID NO: 9173 - DNA, 201 bp, Homo sapiens
atccgtgctccaagtttataattgctataggaaataatgcagtagcatttctgtcatcatttgttatgaattcaggagtctgggaggaagttggttgtgcyaaactctggaatgaatggtgtagaacaacagacactacacatctgtcctccacagaggctttttgtgtgttttatcatctaaaatccaatccctcggttt

SEQ ID NO: 9174 - DNA, 201 bp, Homo sapiens
atttcaaagactcggcgtgttgtccattgctagaacaaccgaatatagtacacgaccttcctgcagcagttctaagctactgtcaagtatggaaaatcccrgcaattctgtacttgtgttatactgatgtgatgaaattagacctaatcacagtggaagcttttaagcctatactttctaccagaagcttgaagggtttgg

SEQ ID NO: 9175 - DNA, 107 bp, Homo sapiens
acttgtccattcctttaaggggagcagcctgcactcttttgtagattacttttgggggatatattttgagaatgatgaaacggaataaaattgtaaaaaaytaattg

SEQ ID NO: 9176 - DNA, 201 bp, Homo sapiens
cgagaccccctcccccaatctgtaatttaaaaacaaaaaagctgcggggactgctggcccagggcatgacagcgcgggcgggcggtgtagagggcgtggcygcgagctcagggtgtgcctgggagcgagccctgtgcggggcgggacgtagcgcccgcgcggtgggggtgtggccgcgagcttgggctgtgcgcggagggc

SEQ ID NO: 9177 - DNA, 201 bp, Homo sapiens
acctaatcacagtggaagcttttaagcctatactttctaccagaagcttgaagggtttggttaagaatattccccaaagcactgagatactaaagaaattsatgacaacaaatgagattcagagtaacatttatacatgatcttaaacattgttttgtagtgtatattacttgtccattcctttaaggggagcagcctgca

SEQ ID NO: 9178 - DNA, 201 bp, Homo sapiens
cgcggtggctgaggcctgtaatccaagcactttgggaggtctaaggaggacgatcgctagagtcctggagttcgagaccagtctgggcaacatagcgagaccccctcccccaatctgtaatttaaaaacaaaaaagctgcggggactgctggcccagggcatgacagcgcgggcgggcggtgtagagggcgtggccgcgag

SEQ ID NO: 9179 - DNA, 201 bp, Homo sapiens
gtcagtgcagttgctatgttgcagaagatcaacagtatcagtggctggaaaaggtttttggctcttgtccaaggaagaacatgcagataactattctcacrtgtcgacatgttaccgattataaaacctcagaatccaccggcagccttccttctcctttcctgagagccctaaaaacacagaatttcaaagactcggcgt

SEQ ID NO: 9180 - DNA, 201 bp, Homo sapiens
ttcggagaggtggtgaaggcgccgtgccgagctgggactgaggacgaagaggaggaggaggaggggcggagggagacgcccgaggacagggaggtgcgtcygcagctggcgcggaagagggaagtgcggctccttcgaagacaaacaaaaacatctttggaagtttctttgctagaaaaatatccgtgctccaagtttata

SEQ ID NO: 9181 - DNA, 201 bp, Homo sapiens
gcgagcttgggctgtgcgcggagggcgtggcctgtgcggggcgggacttattgcccgcgcggtgagggagcgtggtctcgcgcaagccggcgtgcggtccsgcggcgctgcagttgtgtccagccggtcacggggcggctatggcggccacgttcttcggagaggtggtgaaggcgccgtgccgagctgggactgaggacg

SEQ ID NO: 9182 - DNA, 201 bp, Homo sapiens
tcggagaggtggtgaaggcgccgtgccgagctgggactgaggacgaagaggaggaggaggaggggcggagggagacgcccgaggacagggaggtgcgtctscagctggcgcggaagagggaagtgcggctccttcgaagacaaacaaaaacatctttggaagtttctttgctagaaaaatatccgtgctccaagtttataa

SEQ ID NO: 9183 - DNA, 201 bp, Homo sapiens
aaaaaagctgcggggactgctggcccagggcatgacagcgcgggcgggcggtgtagagggcgtggccgcgagctcagggtgtgcctgggagcgagccctgygcggggcgggacgtagcgcccgcgcggtgggggtgtggccgcgagcttgggctgtgcgcggagggcgtggcctgtgcggggcgggacttattgcccgcgc

SEQ ID NO: 9184 - DNA, 201 bp, Homo sapiens
ttttctctgtcagtgcagttgctatgttgcagaagatcaacagtatcagtggctggaaaaggtttttggctcttgtccaaggaagaacatgcagataactrttctcacatgtcgacatgttaccgattataaaacctcagaatccaccggcagccttccttctcctttcctgagagccctaaaaacacagaatttcaaaga

SEQ ID NO: 9185 - DNA, 201 bp, Homo sapiens
aaaacaaaaaagctgcggggactgctggcccagggcatgacagcgcgggcgggcggtgtagagggcgtggccgcgagctcagggtgtgcctgggagcgagycctgtgcggggcgggacgtagcgcccgcgcggtgggggtgtggccgcgagcttgggctgtgcgcggagggcgtggcctgtgcggggcgggacttattgcc

SEQ ID NO: 9186 - DNA, 201 bp, Homo sapiens
ctgttccttgtgagggtccacctggctctgaacctcctaggagaccaccacctgccccccacgatggggacagaaaggagctgccccgggagcagcctctrccccctggccccattggcacagaacgatcacagcgtacagaccgaggcacagagcctggccccattcggccatcccatcgacctggtcccccagtccagt

SEQ ID NO: 9187 - DNA, 201 bp, Homo sapiens
ggcccccacctgctcctgctactcgggtgctgccttcacctgccaggcccttccccgctagcttggggcgagcagagctgcatccagtggaactaaagccrttccaggattatcaaaaactgagcagcaaccttgggggacctggatcatcacggactcccccaactggaaggtccttctctggcctcaattcccgtctca

SEQ ID NO: 9188 - DNA, 201 bp, Homo sapiens
ccagtcctttgcctgacacatcgttgcttcaggtacgccaggatctgccatccccttcggatttttattctactcctctgcagcctggtggccaaagtggmtttctcccttcaggggctcctgcccagcagatgcttctacccatggtagactcacagctgcctgtggtgaactttggctccctgccgccagcaccacctc

SEQ ID NO: 9189 - DNA, 201 bp, Homo sapiens
gcagcaggataaaccgcctcgtttccggaggctgaagcaggaacgggagaatgccgcaagggggtctgagggcaagccctccctaacccttccagcctccrctcctggacctgaggaggccctcacaacagtcacagtggccccagcacctcgccgggcagctgccaagtctcctgatctgtcaaaccagaactcagacca

SEQ ID NO: 9190 - DNA, 201 bp, Homo sapiens
aggacaaggctgccaaggaaagggagtctgccgaacagtcgtctgggcccggaccaagcctccgcccccaaaattctacaacttggagggacggaggtggkcgtggccctgatgagctggagggcccggactccaaacttcatcatggtcatgatccccggggtgggctacagccttcaggcccaccccagttccctccct

SEQ ID NO: 9191 - DNA, 201 bp, Homo sapiens
acggagcttctcaagtcagcggccaggcatggaacggcagaatcggcgccctggcccagggggcaaggctggcagcagtggcagcagcagtggaggaggcrgtgggggtcctggaggaaggaccgggccaggacgaggcgacaagaggagctggccctctcccaagaaccgaagtcgtcctccagaggagcgtcccccggg

SEQ ID NO: 9192 - DNA, 201 bp, Homo sapiens
agccagagagccaaggatttgagtaaacggagcttctcaagtcagcggccaggcatggaacggcagaatcggcgccctggcccagggggcaaggctggcarcagtggcagcagcagtggaggaggcggtgggggtcctggaggaaggaccgggccaggacgaggcgacaagaggagctggccctctcccaagaaccgaagt

SEQ ID NO: 9193 - DNA, 201 bp, Homo sapiens
atctggctccttcagacaaggaggctcccacacccaaggagggaacactcacccaggtccctctcgctcccccaccaccaggagccccaccttcaccagcsccagcccgcttcactgcccggggtgggcgagtcttcactcccagaggggtgccatctcgccggggccgaggaggagggaggccccctcctcaagtttgcc

SEQ ID NO: 9194 - DNA, 201 bp, Homo sapiens
acaaagaggcacccccaccagtactgctgacacccaaggctgtgggaactcctgggggaggtggaggtggagccgtaccaggtatttcagccatgtcccgyggagatctgagccagagagccaaggatttgagtaaacggagcttctcaagtcagcggccaggcatggaacggcagaatcggcgccctggcccagggggca

SEQ ID NO: 9195 - DNA, 201 bp, Homo sapiens
gccggcccccacccatgcccccaatgaactttgatccccgatggatgatgattcctccttatgtggacccccggctcctccagggtcgtccccctctagasttctaccctcctggtgtgcatccctctggcctagttccccgagagcgttcagacagtgggggctcaagctcagagccatttgaccgtcatgcacctgcta

SEQ ID NO: 9196 - DNA, 201 bp, Homo sapiens
agaatgatgatggttgggcaggggcccatgaagaggttgactacactgaaaagctcaagttcagcgatgaggaagatgggcgagactctgatgaggagggwgctgagggccacagggattcccaatcagcttctggtgaggaacggccccctgaagcagatggcaaaaagggcaactcccccaacagcgaaccgcccactc

SEQ ID NO: 9197 - DNA, 201 bp, Homo sapiens
ccaagaaggagccccctaaggaggagactgcacagctgacggggccagaagcaggccgaaagcctgcccgcggagtcgggagtggaggccagggccccccmccaccacgcagagagagtcgcacagagacccgctggggccctcgtccagggagcagtcgtcgtggaatccctccagaggagccaggggccccaccccgcc

SEQ ID NO: 9198 - DNA, 201 bp, Homo sapiens
gataaaccgcctcgtttccggaggctgaagcaggaacgggagaatgccgcaagggggtctgagggcaagccctccctaacccttccagcctccgctcctgsacctgaggaggccctcacaacagtcacagtggccccagcacctcgccgggcagctgccaagtctcctgatctgtcaaaccagaactcagaccaagccaat

SEQ ID NO: 9199 - DNA, 201 bp, Homo sapiens
aggctgcggatgaggatgacaaggggatgaggagcgagactcctccagtacctcccccaccaccctatctggccagttatccaggctttcctgagaatggrgcccctgggcccccaatctctcgctttcctctggaggaaccagggccccgtccactcccctggcccccaggcagtgatgaagtggccaagatacaaactc

SEQ ID NO: 9200 - DNA, 201 bp, Homo sapiens
ccgccctatggaccccaggggccttaccgataccccactcctgatgggcccagccgttttccccgtgtggcgggcccccgaggctcagggccaccaatgcrcttagtagagcctgtgggtcgtccctctattctcaaagaggataatctcaaagagtttgatcagttggatcaggagaatgatgatggttgggcaggggcc

SEQ ID NO: 9201 - DNA, 201 bp, Homo sapiens
ggctgcggatgaggatgacaaggggatgaggagcgagactcctccagtacctcccccaccaccctatctggccagttatccaggctttcctgagaatggarcccctgggcccccaatctctcgctttcctctggaggaaccagggccccgtccactcccctggcccccaggcagtgatgaagtggccaagatacaaactcc

SEQ ID NO: 9202 - DNA, 201 bp, Homo sapiens
cggagcccagctcctcaggccagcgcctgtatcctgaggttttctatggcagtgctgggccttccagttctcagatctctgggggagccatggactctcarttacatccaaacagtggaggcttccgccctgggacaccctcactgcacccttacagatcacagcccctatacctaccccccggcccagcccctccctcag

SEQ ID NO: 9203 - DNA, 201 bp, Homo sapiens
gacccccactttgaggagccggggccaatggtgagaggggtgggtgggactcctcgggactctgccggggttagtccctttccccctaaacgtcgggagcrgcctcccagaaaaccagagctgctacaggaggaatctttgccacctcctcatagctctggattcttgggctctaagcctgagggcccaggccctcaggca

SEQ ID NO: 9204 - DNA, 201 bp, Homo sapiens
cctaggagaccaccacctgccccccacgatggggacagaaaggagctgccccgggagcagcctctgccccctggccccattggcacagaacgatcacagcrtacagaccgaggcacagagcctggccccattcggccatcccatcgacctggtcccccagtccagtttggcactagtgacaaggactcagacttacgccta

SEQ ID NO: 9205 - DNA, 201 bp, Homo sapiens
ggggagccatggactctcaattacatccaaacagtggaggcttccgccctgggacaccctcactgcacccttacagatcacagcccctatacctacccccsggcccagcccctccctcagcactgctctctggggtagctctcaagggccagtttctggatttctccacaatgcaagctacagagctggggaagttgccgg

SEQ ID NO: 9206 - DNA, 201 bp, Homo sapiens
tacagtggagtcttccgcacccagcgcgtcgacctttaccagcaggcctccccaccagatgccctgcgctggatacctaagccttgggagcggacagggcygccacctcgagaagggccctcccgacgggcagaggagcctgggtcccgaggggacaaggagcctgggttgcccccaccccgctgagggagttcctcttgc

SEQ ID NO: 9207 - DNA, 191 bp, Homo sapiens
gcccccaccccgctgagggagttcctcttgccccctacccccggggcttgtatatagattataaatatataagggggaaaggggtgggcggggaggggttstggggctggggcctcacttcccctcctcccccttcccctggtcccctgtccctggggctgtttgttaaaaaagagtaataaaaggattta

SEQ ID NO: 9208 - DNA, 201 bp, Homo sapiens
ccacctgctgccccttctaccccagctccaccacctgcagtccctaaagaactccctgcacctccagctccacctccagcatcagccccaacaccagagamagaacctgaagagccagcacaggcccctcctgcccaatctactcctactccaggtgtggctgcggctcccactctggtgagtggtggtggcagtaccagt

SEQ ID NO: 9209 - DNA, 201 bp, Homo sapiens
aaagttgccattgcccggcgtatgccacctccagccaaccttccaagcctgaaagccgagaacaaaggcaatgaccccaatgtctcactagtgccaaaagwcggaacaggatgggcaagcaaacaggagcagtccgaccccaagagttccgatgcctcaaccgctcagccgccggaatcgcagccactgccggcttcacag

SEQ ID NO: 9210 - DNA, 201 bp, Homo sapiens
gcagcaccagtggcagcagcatcaacagggctctgcccctcctaccccagtgcccccatcaccaccacagcctgtgaccctgggggctgtgccagctccamaggctccacccccgccccccaaggccctgtacccaggtgctctgggccggcccccacccatgcccccaatgaactttgatccccgatggatgatgattcc

SEQ ID NO: 9211 - DNA, 201 bp, Homo sapiens
atgaaagagtgggtcctacctcttgccggggtcggggccgaggcgagtattttgccagagggaggggttttcgggggacctatgggggacgagggcggggrgcccgaagccgggaattccgcagttaccgagagtttcgaggagatgatgggcgtggaggtgggacagggggaccaaaccaccctcctgctccccgaggcc

SEQ ID NO: 9212 - DNA, 201 bp, Homo sapiens
ccccgctagcttggggcgagcagagctgcatccagtggaactaaagccgttccaggattatcaaaaactgagcagcaaccttgggggacctggatcatcayggactcccccaactggaaggtccttctctggcctcaattcccgtctcaaggccacgccttccacctacagtggagtcttccgcacccagcgcgtcgacct

SEQ ID NO: 9213 - DNA, 201 bp, Homo sapiens
cgttccaggattatcaaaaactgagcagcaaccttgggggacctggatcatcacggactcccccaactggaaggtccttctctggcctcaattcccgtctsaaggccacgccttccacctacagtggagtcttccgcacccagcgcgtcgacctttaccagcaggcctccccaccagatgccctgcgctggatacctaagc

SEQ ID NO: 9214 - DNA, 201 bp, Homo sapiens
ccatggtagactcacagctgcctgtggtgaactttggctccctgccgccagcaccacctcctgccccacctcccctttctctgttacctgtgggccctgcyctgcagccccccagcctggctgtgcggcccccacctgctcctgctactcgggtgctgccttcacctgccaggcccttccccgctagcttggggcgagcag

SEQ ID NO: 9215 - DNA, 190 bp, Homo sapiens
cccccaccccgctgagggagttcctcttgccccctacccccggggcttgtatatagattataaatatataagggggaaaggggtgggcggggaggggttgyggggctggggcctcacttcccctcctcccccttcccctggtcccctgtccctggggctgtttgttaaaaaagagtaataaaaggattta

SEQ ID NO: 9216 - DNA, 201 bp, Homo sapiens
aaacggagcttctcaagtcagcggccaggcatggaacggcagaatcggcgccctggcccagggggcaaggctggcagcagtggcagcagcagtggaggagscggtgggggtcctggaggaaggaccgggccaggacgaggcgacaagaggagctggccctctcccaagaaccgaagtcgtcctccagaggagcgtcccccg

SEQ ID NO: 9217 - DNA, 201 bp, Homo sapiens
aggggctcctgcccagcagatgcttctacccatggtagactcacagctgcctgtggtgaactttggctccctgccgccagcaccacctcctgccccacctyccctttctctgttacctgtgggccctgctctgcagccccccagcctggctgtgcggcccccacctgctcctgctactcgggtgctgccttcacctgccag

SEQ ID NO: 9218 - DNA, 201 bp, Homo sapiens
gtgctgagaagctcaagcgactcgatgaaaagtttggggcacctgacaagcggctcaaagcagagcctgctgccccacctgctgccccttctaccccagcyccaccacctgcagtccctaaagaactccctgcacctccagctccacctccagcatcagccccaacaccagagaaagaacctgaagagccagcacaggccc

SEQ ID NO: 9219 - DNA, 201 bp, Homo sapiens
tcctaagacggcctgggcagaaacctctcggcctccagagacagagccgggacctcctgccccaaagcctcccctacccccacctcaccggggccccgccrggaactggggcccccctggggactacccagatcgtgggggtcctccctgcaagcccccagcacctgaagatgaggatgaggcatggcggcagcgacgaaa

SEQ ID NO: 9220 - DNA, 201 bp, Homo sapiens
ttatgtggacccccggctcctccagggtcgtccccctctagacttctaccctcctggtgtgcatccctctggcctagttccccgagagcgttcagacagtsggggctcaagctcagagccatttgaccgtcatgcacctgctatgttacgggaacggggcactccaccggtggatccaaagttggcctgggtaggagatgt

SEQ ID NO: 9221 - DNA, 201 bp, Homo sapiens
caggctgcggatgaggatgacaaggggatgaggagcgagactcctccagtacctcccccaccaccctatctggccagttatccaggctttcctgagaatgragcccctgggcccccaatctctcgctttcctctggaggaaccagggccccgtccactcccctggcccccaggcagtgatgaagtggccaagatacaaact

SEQ ID NO: 9222 - DNA, 201 bp, Homo sapiens
cagacagtgggggctcaagctcagagccatttgaccgtcatgcacctgctatgttacgggaacggggcactccaccggtggatccaaagttggcctgggtrggagatgtcttcaccgccacacccgctgaaccccgcccacttacctcacctctgcgccaggctgcggatgaggatgacaaggggatgaggagcgagactc

SEQ ID NO: 9223 - DNA, 201 bp, Homo sapiens
gcggagtcgggagtggaggccagggccccccaccaccacgcagagagagtcgcacagagacccgctggggccctcgtccagggagcagtcgtcgtggaatscctccagaggagccaggggccccaccccgccgggctgggcctataaagaaacctccaccacctacaaaagtagaagagctgcctcccaagcccctcgaac

SEQ ID NO: 9224 - DNA, 201 bp, Homo sapiens
gaaagagtgggtcctacctcttgccggggtcggggccgaggcgagtattttgccagagggaggggttttcgggggacctatgggggacgagggcggggagsccgaagccgggaattccgcagttaccgagagtttcgaggagatgatgggcgtggaggtgggacagggggaccaaaccaccctcctgctccccgaggccgc

SEQ ID NO: 9225 - DNA, 201 bp, Homo sapiens
aggtgggacagggggaccaaaccaccctcctgctccccgaggccgcactgccagcgagacacggagcgagggttcagagtatgaggaaatccccaagcggygccggcagcggggctcagaaacaggcagcgagacccatgagagtgatctggctccttcagacaaggaggctcccacacccaaggagggaacactcaccca

SEQ ID NO: 9226 - DNA, 201 bp, Homo sapiens
tcccacacccaaggagggaacactcacccaggtccctctcgctcccccaccaccaggagccccaccttcaccagccccagcccgcttcactgcccggggtsggcgagtcttcactcccagaggggtgccatctcgccggggccgaggaggagggaggccccctcctcaagtttgcccaggctggagccctccagccaagtc

SEQ ID NO: 9227 - DNA, 201 bp, Homo sapiens
tctcctaggcccccaacccgatacgagccccagagggtcaacagcggcctcagttctgacccccactttgaggagccggggccaatggtgagaggggtggrtgggactcctcgggactctgccggggttagtccctttccccctaaacgtcgggagcggcctcccagaaaaccagagctgctacaggaggaatctttgcca

SEQ ID NO: 9228 - DNA, 201 bp, Homo sapiens
gatacgtataagggcaagtccttagagatccagaaacccgctgttgcccctcgccatggcctgcagagtctcgggaaagttgccattgcccggcgtatgcsacctccagccaaccttccaagcctgaaagccgagaacaaaggcaatgaccccaatgtctcactagtgccaaaagacggaacaggatgggcaagcaaacag

SEQ ID NO: 9229 - DNA, 201 bp, Homo sapiens
cacagcaaccctgctggcatccaacaggctctggcccagcttagtagccgtcaagggagtgtaactgcaccagggggtcatccaaggcacaagcctgggcytccccaagcccctcagggcccctctcctaggcccccaacccgatacgagccccagagggtcaacagcggcctcagttctgacccccactttgaggagccg

SEQ ID NO: 9230 - DNA, 201 bp, Homo sapiens
attggcacagaacgatcacagcgtacagaccgaggcacagagcctggccccattcggccatcccatcgacctggtcccccagtccagtttggcactagtgrcaaggactcagacttacgcctagtggtaggagacagcttgaaagcagagaaggagctaacagcatcagtcactgaggccattcctgtatcacgagactgg

SEQ ID NO: 9231 - DNA, 201 bp, Homo sapiens
tacagaccgaggcacagagcctggccccattcggccatcccatcgacctggtcccccagtccagtttggcactagtgacaaggactcagacttacgcctartggtaggagacagcttgaaagcagagaaggagctaacagcatcagtcactgaggccattcctgtatcacgagactgggagctgcttcccagtgctgctgc

SEQ ID NO: 9232 - DNA, 201 bp, Homo sapiens
gaccccaatgtctcactagtgccaaaagacggaacaggatgggcaagcaaacaggagcagtccgaccccaagagttccgatgcctcaaccgctcagccgcyggaatcgcagccactgccggcttcacagacgcctgcctccaaccagccgaaacgacccccagcagcccccgagaacactcctttggttccaagcggggta

SEQ ID NO: 9233 - DNA, 201 bp, Homo sapiens
tgtccgatcgctcggggccgactgccaagggaaaggatggaaagaagtattcctcgctcaacctgtttgatacgtataagggcaagtccttagagatccaraaacccgctgttgcccctcgccatggcctgcagagtctcgggaaagttgccattgcccggcgtatgccacctccagccaaccttccaagcctgaaagccg

SEQ ID NO: 9234 - DNA, 201 bp, Homo sapiens
ccccagtccagtttggcactagtgacaaggactcagacttacgcctagtggtaggagacagcttgaaagcagagaaggagctaacagcatcagtcactgargccattcctgtatcacgagactgggagctgcttcccagtgctgctgcctctgctgagccacaatccaagaacctggattctgggcactgtgtcccggagc

SEQ ID NO: 9235 - DNA, 201 bp, Homo sapiens
tggaggcttccgccctgggacaccctcactgcacccttacagatcacagcccctatacctaccccccggcccagcccctccctcagcactgctctctgggktagctctcaagggccagtttctggatttctccacaatgcaagctacagagctggggaagttgccggctggaggagttctctaccctccaccttccttcct

SEQ ID NO: 9236 - DNA, 201 bp, Homo sapiens
ctgcatccagtggaactaaagccgttccaggattatcaaaaactgagcagcaaccttgggggacctggatcatcacggactcccccaactggaaggtcctyctctggcctcaattcccgtctcaaggccacgccttccacctacagtggagtcttccgcacccagcgcgtcgacctttaccagcaggcctccccaccagat

SEQ ID NO: 9237 - DNA, 201 bp, Homo sapiens
gggagccatggactctcaattacatccaaacagtggaggcttccgccctgggacaccctcactgcacccttacagatcacagcccctatacctaccccccrgcccagcccctccctcagcactgctctctggggtagctctcaagggccagtttctggatttctccacaatgcaagctacagagctggggaagttgccggc

SEQ ID NO: 9238 - DNA, 201 bp, Homo sapiens
ccacctgccccccacgatggggacagaaaggagctgccccgggagcagcctctgccccctggccccattggcacagaacgatcacagcgtacagaccgagscacagagcctggccccattcggccatcccatcgacctggtcccccagtccagtttggcactagtgacaaggactcagacttacgcctagtggtaggagac

SEQ ID NO: 9239 - DNA, 201 bp, Homo sapiens
gtgctgagaagctcaagcgactcgatgaaaagtttggggcacctgacaagcggctcaaagcagagcctgctgccccacctgctgccccttctaccccagcyccaccacctgcagtccctaaagaactccctgcacctccagctccacctccagcatcagcctcccaaagtgctgggattacaggcgtgagccactgcacct

SEQ ID NO: 9240 - DNA, 201 bp, Homo sapiens; identical to SEQ ID NO: 9219

SEQ ID NO: 9241 - DNA, 201 bp, Homo sapiens; identical to SEQ ID NO: 9190

SEQ ID NO: 9242 - DNA, 201 bp, Homo sapiens; identical to SEQ ID NO: 9228

SEQ ID NO: 9243 - DNA, 201 bp, Homo sapiens; identical to SEQ ID NO: 9209

SEQ ID NO: 9244 - DNA, 201 bp, Homo sapiens; identical to SEQ ID NO: 9232

SEQ ID NO: 9245 - DNA, 201 bp, Homo sapiens; identical to SEQ ID NO: 9233

SEQ ID NO: 9246 - DNA, 201 bp, Homo sapiens; identical to SEQ ID NO: 9196

SEQ ID NO: 9247 - DNA, 201 bp, Homo sapiens; identical to SEQ ID NO: 9200

SEQ ID NO: 9248 - DNA, 201 bp, Homo sapiens; identical to SEQ ID NO: 9186

SEQ ID NO: 9249 - DNA, 201 bp, Homo sapiens
ggcccccacctgctcctgctactcgggtgctgccttcacctgccaggcccttccccgctagcttggggcgagcagagctgcatccagtggaactaaagccrttccaggattatcaaaaactgagcagcaaccttgggggacctggatcatcacggactcccccaactggaagacgcccttcttcccttaggtccttctctg

SEQ ID NO: 9250 - DNA, 201 bp, Homo sapiens; identical to SEQ ID NO: 9188

SEQ ID NO: 9251 - DNA, 201 bp, Homo sapiens; identical to SEQ ID NO: 9189

SEQ ID NO: 9252 - DNA, 201 bp, Homo sapiens; identical to SEQ ID NO: 9190

SEQ ID NO: 9253 - DNA, 201 bp, Homo sapiens; identical to SEQ ID NO: 9191

SEQ ID NO: 9254 - DNA, 201 bp, Homo sapiens; identical to SEQ ID NO: 9192

SEQ ID NO: 9255 - DNA, 201 bp, Homo sapiens; identical to SEQ ID NO: 9193

SEQ ID NO: 9256 - DNA, 201 bp, Homo sapiens; identical to SEQ ID NO: 9194

SEQ ID NO: 9257 - DNA, 201 bp, Homo sapiens; identical to SEQ ID NO: 9195

SEQ ID NO: 9258 - DNA, 201 bp, Homo sapiens; identical to SEQ ID NO: 9197

SEQ ID NO: 9259 - DNA, 201 bp, Homo sapiens; identical to SEQ ID NO: 9198

SEQ ID NO: 9260 - DNA, 201 bp, Homo sapiens; identical to SEQ ID NO: 9199

SEQ ID NO: 9261 - DNA, 201 bp, Homo sapiens; identical to SEQ ID NO: 9196

SEQ ID NO: 9262 - DNA, 201 bp, Homo sapiens; identical to SEQ ID NO: 9201

SEQ ID NO: 9263 - DNA, 201 bp, Homo sapiens; identical to SEQ ID NO: 9200

SEQ ID NO: 9264 - DNA, 201 bp, Homo sapiens; identical to SEQ ID NO: 9202

SEQ ID NO: 9265 - DNA, 201 bp, Homo sapiens; identical to SEQ ID NO: 9203

SEQ ID NO: 9266 - DNA, 201 bp, Homo sapiens; identical to SEQ ID NO: 9204

SEQ ID NO: 9267 - DNA, 201 bp, Homo sapiens; identical to SEQ ID NO: 9205

SEQ ID NO: 9268 - DNA, 201 bp, Homo sapiens; identical to SEQ ID NO: 9206

SEQ ID NO: 9269 - DNA, 190 bp, Homo sapiens
gcccccaccccgctgagggagttcctcttgccccctacccccggggcttgtatatagattataaatatataagggggaaaggggtgggcggggaggggttstggggctggggcctcacttcccctcctcccccttcccctggtcccctgtccctggggctgtttgttaaaaaagagtaataaaaggattt

SEQ ID NO: 9270 - DNA, 201 bp, Homo sapiens; identical to SEQ ID NO: 9208

SEQ ID NO: 9271 - DNA, 201 bp, Homo sapiens; identical to SEQ ID NO: 9209

SEQ ID NO: 9272 - DNA, 201 bp, Homo sapiens; identical to SEQ ID NO: 9210

SEQ ID NO: 9273 - DNA, 201 bp, Homo sapiens; identical to SEQ ID NO: 9211

SEQ ID NO: 9274 - DNA, 201 bp, Homo sapiens
ccccgctagcttggggcgagcagagctgcatccagtggaactaaagccgttccaggattatcaaaaactgagcagcaaccttgggggacctggatcatcayggactcccccaactggaagacgcccttcttcccttaggtccttctctggcctcaattcccgtctcaaggccacgccttccacctacagtggagtcttccg

SEQ ID NO: 9275 - DNA, 201 bp, Homo sapiens
aactgagcagcaaccttgggggacctggatcatcacggactcccccaactggaagacgcccttcttcccttaggtccttctctggcctcaattcccgtctsaaggccacgccttccacctacagtggagtcttccgcacccagcgcgtcgacctttaccagcaggcctccccaccagatgccctgcgctggatacctaagc

SEQ ID NO: 9276 - DNA, 201 bp, Homo sapiens; identical to SEQ ID NO: 9214

SEQ ID NO: 9277 - DNA, 189 bp, Homo sapiens
cccccaccccgctgagggagttcctcttgccccctacccccggggcttgtatatagattataaatatataagggggaaaggggtgggcggggaggggttgyggggctggggcctcacttcccctcctcccccttcccctggtcccctgtccctggggctgtttgttaaaaaagagtaataaaaggattt

SEQ ID NO: 9278 - DNA, 201 bp, Homo sapiens; identical to SEQ ID NO: 9216

SEQ ID NO: 9279 - DNA, 201 bp, Homo sapiens; identical to SEQ ID NO: 9217

SEQ ID NO: 9280 - DNA, 201 bp, Homo sapiens; identical to SEQ ID NO: 9218

SEQ ID NO: 9281 - DNA, 201 bp, Homo sapiens; identical to SEQ ID NO: 9219

SEQ ID NO: 9282 - DNA, 201 bp, Homo sapiens; identical to SEQ ID NO: 9220

SEQ ID NO: 9283 - DNA, 201 bp, Homo sapiens; identical to SEQ ID NO: 9221

SEQ ID NO: 9284 - DNA, 201 bp, Homo sapiens; identical to SEQ ID NO: 9222

SEQ ID NO: 9285 - DNA, 201 bp, Homo sapiens; identical to SEQ ID NO: 9223

SEQ ID NO: 9286 - DNA, 201 bp, Homo sapiens; identical to SEQ ID NO: 9224

SEQ ID NO: 9287 - DNA, 201 bp, Homo sapiens; identical to SEQ ID NO: 9225

SEQ ID NO: 9288 - DNA, 201 bp, Homo sapiens; identical to SEQ ID NO: 9226

SEQ ID NO: 9289 - DNA, 201 bp, Homo sapiens; identical to SEQ ID NO: 9227

SEQ ID NO: 9290 - DNA, 201 bp, Homo sapiens; identical to SEQ ID NO: 9229

SEQ ID NO: 9291 - DNA, 201 bp, Homo sapiens
aacccgctggcattttcgaccctctctccgtcttgttctccagttgcccctcgccatggcctgcagagtctcgggaaagttgccattgcccggcgtatgcsacctccagccaaccttccaagcctgaaagccgagaacaaaggcaatgaccccaatgtctcactagtgccaaaagacggaacaggatgggcaagcaaacag

SEQ ID NO: 9292 - DNA, 201 bp, Homo sapiens; identical to SEQ ID NO: 9230

SEQ ID NO: 9293 - DNA, 201 bp, Homo sapiens; identical to SEQ ID NO: 9231

SEQ ID NO: 9294 - DNA, 201 bp, Homo sapiens; identical to SEQ ID NO: 9232

SEQ ID NO: 9295 - DNA, 201 bp, Homo sapiens; identical to SEQ ID NO: 9234

SEQ ID NO: 9296 - DNA, 201 bp, Homo sapiens
tgtccgatcgctcggggccgactgccaagggaaaggatggaaagaagtattcctcgctcaacctgtttgatacgtataagggcaagtccttagagatccaraaacccgctggcattttcgaccctctctccgtcttgttctccagttgcccctcgccatggcctgcagagtctcgggaaagttgccattgcccggcgtatg

SEQ ID NO: 9297 - DNA, 201 bp, Homo sapiens; identical to SEQ ID NO: 9235

SEQ ID NO: 9298 - DNA, 201 bp, Homo sapiens
aagccgttccaggattatcaaaaactgagcagcaaccttgggggacctggatcatcacggactcccccaactggaagacgcccttcttcccttaggtcctyctctggcctcaattcccgtctcaaggccacgccttccacctacagtggagtcttccgcacccagcgcgtcgacctttaccagcaggcctccccaccagat

SEQ ID NO: 9299 - DNA, 201 bp, Homo sapiens; identical to SEQ ID NO: 9237

SEQ ID NO: 9300 - DNA, 201 bp, Homo sapiens; identical to SEQ ID NO: 9238

SEQ ID NO: 9301 - DNA, 201 bp, Homo sapiens; identical to SEQ ID NO: 9186

SEQ ID NO: 9302 - DNA, 201 bp, Homo sapiens; identical to SEQ ID NO: 9187

SEQ ID NO: 9303 - DNA, 201 bp, Homo sapiens; identical to SEQ ID NO: 9188

SEQ ID NO: 9304 - DNA, 201 bp, Homo sapiens; identical to SEQ ID NO: 9189

SEQ ID NO: 9305 - DNA, 201 bp, Homo sapiens; identical to SEQ ID NO: 9190

SEQ ID NO: 9306 - DNA, 201 bp, Homo sapiens; identical to SEQ ID NO: 9191

SEQ ID NO: 9307 - DNA, 201 bp, Homo sapiens; identical to SEQ ID NO: 9192

SEQ ID NO: 9308 - DNA, 201 bp, Homo sapiens; identical to SEQ ID NO: 9193

SEQ ID NO: 9309 - DNA, 201 bp, Homo sapiens; identical to SEQ ID NO: 9194

SEQ ID NO: 9310 - DNA, 201 bp, Homo sapiens; identical to SEQ ID NO: 9195

SEQ ID NO: 9311 - DNA, 201 bp, Homo sapiens; identical to SEQ ID NO: 9196

SEQ ID NO: 9312 - DNA, 201 bp, Homo sapiens; identical to SEQ ID NO: 9197

SEQ ID NO: 9313 - DNA, 201 bp, Homo sapiens; identical to SEQ ID NO: 9198

SEQ ID NO: 9314 - DNA, 201 bp, Homo sapiens; identical to SEQ ID NO: 9199

SEQ ID NO: 9315 - DNA, 201 bp, Homo sapiens; identical to SEQ ID NO: 9200

SEQ ID NO: 9316 - DNA, 201 bp, Homo sapiens; identical to SEQ ID NO: 9201

SEQ ID NO: 9317 - DNA, 201 bp, Homo sapiens; identical to SEQ ID NO: 9202

SEQ ID NO: 9318 - DNA, 201 bp, Homo sapiens; identical to SEQ ID NO: 9203

SEQ ID NO: 9319 - DNA, 201 bp, Homo sapiens; identical to SEQ ID NO: 9204

SEQ ID NO: 9320 - DNA, 201 bp, Homo sapiens; identical to SEQ ID NO: 9205

SEQ ID NO: 9321 - DNA, 201 bp, Homo sapiens; identical to SEQ ID NO: 9206

SEQ ID NO: 9322 - DNA, 191 bp, Homo sapiens; identical to SEQ ID NO: 9207

SEQ ID NO: 9323 - DNA, 201 bp, Homo sapiens; identical to SEQ ID NO: 9208

SEQ ID NO: 9324 - DNA, 201 bp, Homo sapiens; identical to SEQ ID NO: 9209

SEQ ID NO: 9325 - DNA, 201 bp, Homo sapiens; identical to SEQ ID NO: 9210

SEQ ID NO: 9326 - DNA, 201 bp, Homo sapiens; identical to SEQ ID NO: 9211

SEQ ID NO: 9327 - DNA, 201 bp, Homo sapiens; identical to SEQ ID NO: 9212

SEQ ID NO: 9328 - DNA, 201 bp, Homo sapiens; identical to SEQ ID NO: 9213

SEQ ID NO: 9329 - DNA, 201 bp, Homo sapiens; identical to SEQ ID NO: 9214

SEQ ID NO: 9330 - DNA, 190 bp, Homo sapiens; identical to SEQ ID NO: 9215

SEQ ID NO: 9331 - DNA, 201 bp, Homo sapiens; identical to SEQ ID NO: 9216

SEQ ID NO: 9332 - DNA, 201 bp, Homo sapiens; identical to SEQ ID NO: 9217

SEQ ID NO: 9333 - DNA, 201 bp, Homo sapiens; identical to SEQ ID NO: 9218

SEQ ID NO: 9334 - DNA, 201 bp, Homo sapiens; identical to SEQ ID NO: 9220

SEQ ID NO: 9335 - DNA, 201 bp, Homo sapiens; identical to SEQ ID NO: 9221

SEQ ID NO: 9336 - DNA, 201 bp, Homo sapiens; identical to SEQ ID NO: 9222

SEQ ID NO: 9337 - DNA, 201 bp, Homo sapiens; identical to SEQ ID NO: 9223

SEQ ID NO: 9338 - DNA, 201 bp, Homo sapiens; identical to SEQ ID NO: 9224

SEQ ID NO: 9339 - DNA, 201 bp, Homo sapiens; identical to SEQ ID NO: 9225

SEQ ID NO: 9340 - DNA, 201 bp, Homo sapiens; identical to SEQ ID NO: 9226

SEQ ID NO: 9341 - DNA, 201 bp, Homo sapiens; identical to SEQ ID NO: 9227

SEQ ID NO: 9342 - DNA, 201 bp, Homo sapiens; identical to SEQ ID NO: 9228

SEQ ID NO: 9343 - DNA, 201 bp, Homo sapiens; identical to SEQ ID NO: 9229

SEQ ID NO: 9344 - DNA, 201 bp, Homo sapiens; identical to SEQ ID NO: 9230

SEQ ID NO: 9345 - DNA, 201 bp, Homo sapiens; identical to SEQ ID NO: 9231

SEQ ID NO: 9346 - DNA, 201 bp, Homo sapiens; identical to SEQ ID NO: 9232

SEQ ID NO: 9347 - DNA, 201 bp, Homo sapiens; identical to SEQ ID NO: 9233

SEQ ID NO: 9348 - DNA, 201 bp, Homo sapiens; identical to SEQ ID NO: 9234

SEQ ID NO: 9349 - DNA, 201 bp, Homo sapiens; identical to SEQ ID NO: 9235

SEQ ID NO: 9350 - DNA, 201 bp, Homo sapiens; identical to SEQ ID NO: 9236

SEQ ID NO: 9351 - DNA, 201 bp, Homo sapiens; identical to SEQ ID NO: 9237

SEQ ID NO: 9352 - DNA, 201 bp, Homo sapiens; identical to SEQ ID NO: 9238

SEQ ID NO: 9353 - DNA, 201 bp, Homo sapiens; identical to SEQ ID NO: 9186

SEQ ID NO: 9354 - DNA, 201 bp, Homo sapiens; identical to SEQ ID NO: 9187

SEQ ID NO: 9355 - DNA, 201 bp, Homo sapiens; identical to SEQ ID NO: 9188

SEQ ID NO: 9356 - DNA, 201 bp, Homo sapiens; identical to SEQ ID NO: 9189

SEQ ID NO: 9357 - DNA, 201 bp, Homo sapiens; identical to SEQ ID NO: 9190

SEQ ID NO: 9358 - DNA, 201 bp, Homo sapiens; identical to SEQ ID NO: 9191

SEQ ID NO: 9359 - DNA, 201 bp, Homo sapiens; identical to SEQ ID NO: 9192

SEQ ID NO: 9360 - DNA, 201 bp, Homo sapiens; identical to SEQ ID NO: 9193

SEQ ID NO: 9361 - DNA, 201 bp, Homo sapiens; identical to SEQ ID NO: 9194

SEQ ID NO: 9362 - DNA, 201 bp, Homo sapiens; identical to SEQ ID NO: 9195

SEQ ID NO: 9363 - DNA, 201 bp, Homo sapiens; identical to SEQ ID NO: 9197

SEQ ID NO: 9364 - DNA, 201 bp, Homo sapiens; identical to SEQ ID NO: 9198

SEQ ID NO: 9365 - DNA, 201 bp, Homo sapiens; identical to SEQ ID NO: 9199

SEQ ID NO: 9366 - DNA, 201 bp, Homo sapiens; identical to SEQ ID NO: 9196

SEQ ID NO: 9367 - DNA, 201 bp, Homo sapiens; identical to SEQ ID NO: 9201

SEQ ID NO: 9368 - DNA, 201 bp, Homo sapiens; identical to SEQ ID NO: 9200

SEQ ID NO: 9369 - DNA, 201 bp, Homo sapiens; identical to SEQ ID NO: 9202

SEQ ID NO: 9370 - DNA, 201 bp, Homo sapiens; identical to SEQ ID NO: 9203

SEQ ID NO: 9371 - DNA, 201 bp, Homo sapiens; identical to SEQ ID NO: 9204

SEQ ID NO: 9372 - DNA, 201 bp, Homo sapiens; identical to SEQ ID NO: 9205

SEQ ID NO: 9373 - DNA, 201 bp, Homo sapiens; identical to SEQ ID NO: 9206

SEQ ID NO: 9374 - DNA, 191 bp, Homo sapiens; identical to SEQ ID NO: 9207

SEQ ID NO: 9375 - DNA, 201 bp, Homo sapiens; identical to SEQ ID NO: 9208

SEQ ID NO: 9376 - DNA, 201 bp, Homo sapiens; identical to SEQ ID NO: 9209

SEQ ID NO: 9377 - DNA, 201 bp, Homo sapiens; identical to SEQ ID NO: 9210

SEQ ID NO: 9378 - DNA, 201 bp, Homo sapiens; identical to SEQ ID NO: 9211

SEQ ID NO: 9379 - DNA, 201 bp, Homo sapiens; identical to SEQ ID NO: 9212

SEQ ID NO: 9380 - DNA, 201 bp, Homo sapiens; identical to SEQ ID NO: 9213

SEQ ID NO: 9381 - DNA, 201 bp, Homo sapiens; identical to SEQ ID NO: 9214

SEQ ID NO: 9382 - DNA, 190 bp, Homo sapiens; identical to SEQ ID NO: 9215

SEQ ID NO: 9383 - DNA, 201 bp, Homo sapiens; identical to SEQ ID NO: 9216

SEQ ID NO: 9384 - DNA, 201 bp, Homo sapiens; identical to SEQ ID NO: 9217

SEQ ID NO: 9385 - DNA, 201 bp, Homo sapiens; identical to SEQ ID NO: 9218

SEQ ID NO: 9386 - DNA, 201 bp, Homo sapiens; identical to SEQ ID NO: 9219

SEQ ID NO: 9387 - DNA, 201 bp, Homo sapiens; identical to SEQ ID NO: 9220

SEQ ID NO: 9388 - DNA, 201 bp, Homo sapiens; identical to SEQ ID NO: 9221

SEQ ID NO: 9389 - DNA, 201 bp, Homo sapiens; identical to SEQ ID NO: 9222

SEQ ID NO: 9390 - DNA, 201 bp, Homo sapiens; identical to SEQ ID NO: 9223

SEQ ID NO: 9391 - DNA, 201 bp, Homo sapiens; identical to SEQ ID NO: 9224

SEQ ID NO: 9392 - DNA, 201 bp, Homo sapiens; identical to SEQ ID NO: 9225

SEQ ID NO: 9393 - DNA, 201 bp, Homo sapiens; identical to SEQ ID NO: 9226

SEQ ID NO: 9394 - DNA, 201 bp, Homo sapiens; identical to SEQ ID NO: 9227

SEQ ID NO: 9395 - DNA, 201 bp, Homo sapiens; identical to SEQ ID NO: 9229

SEQ ID NO: 9396 - DNA, 201 bp, Homo sapiens; identical to SEQ ID NO: 9291

SEQ ID NO: 9397 - DNA, 201 bp, Homo sapiens; identical to SEQ ID NO: 9230

SEQ ID NO: 9398 - DNA, 201 bp, Homo sapiens; identical to SEQ ID NO: 9231

SEQ ID NO: 9399 - DNA, 201 bp, Homo sapiens; identical to SEQ ID NO: 9232

SEQ ID NO: 9400 - DNA, 201 bp, Homo sapiens; identical to SEQ ID NO: 9234

SEQ ID NO: 9401 - DNA, 201 bp, Homo sapiens; identical to SEQ ID NO: 9296

SEQ ID NO: 9402 - DNA, 201 bp, Homo sapiens; identical to SEQ ID NO: 9235

SEQ ID NO: 9403 - DNA, 201 bp, Homo sapiens; identical to SEQ ID NO: 9236

SEQ ID NO: 9404 - DNA, 201 bp, Homo sapiens; identical to SEQ ID NO: 9237

SEQ ID NO: 9405 - DNA, 201 bp, Homo sapiens; identical to SEQ ID NO: 9238

SEQ ID NO: 9406 - DNA, 151 bp, Homo sapiens
gctcctaaatcccctcctgatattgatattgatattgaactgtgggacaayaagacgataacaagtgggctgaaaaactacctcaggtgccttgcagaaccactgatgacttacaagttgcacaaagattttatcattgctgttaaatctg

SEQ ID NO: 9407 - DNA, 201 bp, Homo sapiens
tcctacttctcctgctgctgcataaagaatctcaaccttcattttatttgaacacggaccaaagtgttcctgcttctgagttgtctgtaagctaattctgyagatgttccattcagatttaaagcttttttactgcataggatgtggataggaagcctaactattgtatctgatggcaaggcatatgttgcagccacagta

SEQ ID NO: 9408 - DNA, 201 bp, Homo sapiens
gacagaaaagccttggtctgtggacaactagtcctgaatcaagttccagagaagatgcaaccaagacagatgcagaatcagactgccagagtgttgcttcrgtcactagcccaggagacgtttccccacccatagacctagtcaagaaagagccttatgggctttcaggactgaaaagagcttctgcttcttctctcagat

SEQ ID NO: 9409 - DNA, 201 bp, Homo sapiens
agtcactctcttctcattcctctgaacaaaatagcactacaaagtcagcttcctgccagcccagggagaaatctggagggattccttggattgcaaccccrtcatcttccaatggacagaaaagccttggtctgtggacaactagtcctgaatcaagttccagagaagatgcaaccaagacagatgcagaatcagactgcc

SEQ ID NO: 9410 - DNA, 201 bp, Homo sapiens
gtattttaatgataatttaatttgggcttttgaaatgttcttctacaaatgaaaaagatgtttaaaaacgttacaagggaagctatgccttctgaagtctrtccttagttgaaacagaaaataaacacaaaggtacaagatccttaaattattttgaaccacagaggttgaaattgttttgtgatcttcagcagaaataaa

SEQ ID NO: 9411 - DNA, 201 bp, Homo sapiens
tatatgattgttttgctggtcctaaacatttcaaggatgtaagtctttgttttaatataactttatttgttttccaagtagatgataatattcaaaagcawtaatgtatatgatatctataaaggaagcaaaattaagtcatacactgattccactgtaaacaatctgtccagaattccagacaccttcagcaaacttttt

SEQ ID NO: 9412 - DNA, 123 bp, Homo sapiens
tactggagacgggctaaagctgcttttcccttaaagtaagtttcctacagataaggtatttatgagcactgagaaagtcaggacatgtactctaaatcacwcagaatgttaattccacaggaa

SEQ ID NO: 9413 - DNA, 201 bp, Homo sapiens
tttgaaatgttcttctacaaatgaaaaagatgtttaaaaacgttacaagggaagctatgccttctgaagtctatccttagttgaaacagaaaataaacacmaaggtacaagatccttaaattattttgaaccacagaggttgaaattgttttgtgatcttcagcagaaataaaatcttgaatttgtagagcatagtaatag

SEQ ID NO: 9414 - DNA, 201 bp, Homo sapiens
tttgctgacacctagtttagagggtgtgtaaaactatcttcataactttgagatttttataaaattttacatgaaaatatactgataaattatatgcacayattttctaccagtagcattatagtggcatcatagaagaatatttaccaatgatggggaaactgtaaaactacagtatcaaggcatacaacttaaattcca

SEQ ID NO: 9415 - DNA, 201 bp, Homo sapiens
aaaagatttaaattgttggccattcttttttggttggtttcttattttaaaatatcttacttgtgaaaaatgtgtttttggataatatgtaactctccacwatgtcgcttccgtagcaattgtagagtttcaaatactgtgttaaatactgtatcccagaaatttggaaaccagaaatctgctatatggattttgagatct

SEQ ID NO: 9416 - DNA, 201 bp, Homo sapiens
gtggacaactagtcctgaatcaagttccagagaagatgcaaccaagacagatgcagaatcagactgccagagtgttgcttcagtcactagcccaggagacrtttccccacccatagacctagtcaagaaagagccttatgggctttcaggactgaaaagagcttctgcttcttctctcagatccatctctgcagctgaagg

SEQ ID NO: 9417 - DNA, 201 bp, Homo sapiens
ttagaattaacaagtagagagaataacggtaggcagagtcagaatcaggaataaatatcagtgaatcaaaagaatgaaaaatattatgtaataaaaattakcaatgtaatgtaaacgtttgataaaagagtatctttttcttttatctcttactgttgacctctgtgcactgtaataaggtgtgttgctggatcttcttgg

SEQ ID NO: 9418 - DNA, 201 bp, Homo sapiens
gactgtctcaaatcttggtgtcatatttggcccaactctaatgagagcacaggaagaaactgtggctgctatgatgaatattaaatttcagaatattgtgrtagaaattctgatagagcactatgaaaagatttttcatactgctccagacccaagcattcctcttcctcagcctcagtctcgatctggatcccgaaggac

SEQ ID NO: 9419 - DNA, 201 bp, Homo sapiens
ggagagaccaccgtggcctccattgatgacgctgaggagctcatggccactgataacgcttttgatgtgctgggcttcacttcagaggagaaaaactccaygtataagctgacaggcgccatcatgcactttggaaacatgaagttcaagctgaagcagcgggaggagcaggcggagccagacggcactgaagaggctgac

SEQ ID NO: 9420 - DNA, 201 bp, Homo sapiens
gttcattgatagcaggaagggggcagagaagctgctcagctccctggacattgatcacaaccagtacaagtttggccacaccaaggtgttcttcaaggccrggctgctggggctgctggaggaaatgagggacgagaggctgagccgcatcatcacgcgtatccaggcccagtcccgaggtgtgctcgccagaatggagta

SEQ ID NO: 9421 - DNA, 201 bp, Homo sapiens
ctgagggacagttcattgatagcaggaagggggcagagaagctgctcagctccctggacattgatcacaaccagtacaagtttggccacaccaaggtgttsttcaaggccgggctgctggggctgctggaggaaatgagggacgagaggctgagccgcatcatcacgcgtatccaggcccagtcccgaggtgtgctcgcca

SEQ ID NO: 9422 - DNA, 201 bp, Homo sapiens
tggccactgataacgcttttgatgtgctgggcttcacttcagaggagaaaaactccatgtataagctgacaggcgccatcatgcactttggaaacatgaarttcaagctgaagcagcgggaggagcaggcggagccagacggcactgaagaggctgacaagtctgcctacctcatggggctgaactcagccgacctgctca

SEQ ID NO: 9423 - DNA, 201 bp, Homo sapiens
gcagaagctggaagcgcgggtgcgggagctggagaatgagctggaggccgagcagaagcgcaacgcagagtcggtgaagggcatgaggaagagcgagcggsgcatcaaggagctcacctaccagacggaggaggacaggaaaaacctgctgcggctgcaggacctggtagacaagctgcagctaaaggtcaaggcctacaa

SEQ ID NO: 9424 - DNA, 201 bp, Homo sapiens
aggagtccctggaacatctggagaccttcaagcgggagaacaaaaacctgcaggaggagatctccgacttgactgagcagttgggttccagcggaaagacyatccatgagctggagaaggtccgaaagcagctggaggccgagaagatggagctgcagtcagccctggaggaggccgaggcctccctggagcacgaggagg

SEQ ID NO: 9425 - DNA, 201 bp, Homo sapiens
acaccctgactaaggccaaagtcaagctggagcagcaagtggatgatctggaaggatccctggagcaagagaagaaggtgcgcatggacctggagcgagcraagcggaagctggagggcgacctgaagctgacccaggagagcatcatggacctggagaatgacaagcagcagctggatgagcggctgaaaaaaaaagact

SEQ ID NO: 9426 - DNA, 201 bp, Homo sapiens
acctgggcaaatccgccaacttccagaagccacgcaatatcaaggggaagcctgaagcccacttctccctgatccactatgccggcatcgtggactacaayatcattggctggctgcagaagaacaaggatcctctcaatgagactgtcgtgggcttgtatcagaagtcttccctcaagctgctcagcaccctgtttgcca

SEQ ID NO: 9427 - DNA, 201 bp, Homo sapiens
aggcagaggagcgggcggacatcgccgagtcccaggtcaacaagctgcgggccaagagccgtgacattggcacgaagggcttgaatgaggagtagctttgmcacatcttgatctgctcagccctggaggtgccagcaaagccccatgctggagcctgtgtaacagctccttgggaggaagcagaataaagcaattttcctt

SEQ ID NO: 9428 - DNA, 201 bp, Homo sapiens
caatatcaaggggaagcctgaagcccacttctccctgatccactatgccggcatcgtggactacaacatcattggctggctgcagaagaacaaggatcctstcaatgagactgtcgtgggcttgtatcagaagtcttccctcaagctgctcagcaccctgtttgccaactatgctggggctgatgcgcctattgagaaggg

SEQ ID NO: 9429 - DNA, 201 bp, Homo sapiens
cagaggagaaaaactccatgtataagctgacaggcgccatcatgcactttggaaacatgaagttcaagctgaagcagcgggaggagcaggcggagccagayggcactgaagaggctgacaagtctgcctacctcatggggctgaactcagccgacctgctcaaggggctgtgccaccctcgggtgaaagtgggcaatgagt

SEQ ID NO: 9430 - DNA, 201 bp, Homo sapiens
cttcagaggagaaaaactccatgtataagctgacaggcgccatcatgcactttggaaacatgaagttcaagctgaagcagcgggaggagcaggcggagccrgacggcactgaagaggctgacaagtctgcctacctcatggggctgaactcagccgacctgctcaaggggctgtgccaccctcgggtgaaagtgggcaatg

SEQ ID NO: 9431 - DNA, 201 bp, Homo sapiens
cggctcctggatgatctacacctactcgggcctcttctgtgtcaccgtcaacccttacaagtggctgccggtgtacactcctgaggtggtggctgcctacyggggcaagaagaggagcgaggccccgccccacatcttctccatctccgacaacgcctatcagtacatgctgacagacagagaaaaccagtccatcctgat

SEQ ID NO: 9432 - DNA, 201 bp, Homo sapiens
gacaaccacctgggcaaatccgccaacttccagaagccacgcaatatcaaggggaagcctgaagcccacttctccctgatccactatgccggcatcgtggwctacaacatcattggctggctgcagaagaacaaggatcctctcaatgagactgtcgtgggcttgtatcagaagtcttccctcaagctgctcagcaccctg

SEQ ID NO: 9433 - DNA, 201 bp, Homo sapiens
atcaaggggaagcctgaagcccacttctccctgatccactatgccggcatcgtggactacaacatcattggctggctgcagaagaacaaggatcctctcartgagactgtcgtgggcttgtatcagaagtcttccctcaagctgctcagcaccctgtttgccaactatgctggggctgatgcgcctattgagaagggcaaa

SEQ ID NO: 9434 - DNA, 201 bp, Homo sapiens
tgctgatcaccaacaacccctacgattatgcattcatctcccaaggagagaccaccgtggcctccattgatgacgctgaggagctcatggccactgataaygcttttgatgtgctgggcttcacttcagaggagaaaaactccatgtataagctgacaggcgccatcatgcactttggaaacatgaagttcaagctgaagc

SEQ ID NO: 9435 - DNA, 201 bp, Homo sapiens
cctccattgatgacgctgaggagctcatggccactgataacgcttttgatgtgctgggcttcacttcagaggagaaaaactccatgtataagctgacaggygccatcatgcactttggaaacatgaagttcaagctgaagcagcgggaggagcaggcggagccagacggcactgaagaggctgacaagtctgcctacctca

SEQ ID NO: 9436 - DNA, 201 bp, Homo sapiens
tgagaggatgttcaactggatggtgacgcgcatcaatgccaccctggagaccaagcagccacgccagtacttcataggagtcctggacatcgctggcttcsagatcttcgatttcaacagctttgagcagctctgcatcaacttcaccaacgagaagctgcagcagttcttcaaccaccacatgtttgtgctggagcagga

SEQ ID NO: 9437 - DNA, 201 bp, Homo sapiens
cggaggagacccagcgttctgtcaacgacctcaccagccagcgggccaagttgcaaaccgagaatggtgagctgtcccggcagctggatgagaaggaggcrctgatctcccagctgacccgaggcaagctcacctacacccagcagctggaggacctcaagaggcagctggaggaggaggttaaggcgaagaacgccctgg

SEQ ID NO: 9438 - DNA, 201 bp, Homo sapiens
ggcggagccagacggcactgaagaggctgacaagtctgcctacctcatggggctgaactcagccgacctgctcaaggggctgtgccaccctcgggtgaaartgggcaatgagtacgtcaccaaggggcagaatgtccagcaggtgatatatgccactggggcactggccaaggcagtgtatgagaggatgttcaactggat

SEQ ID NO: 9439 - DNA, 201 bp, Homo sapiens
atcaagccgctgctgaagagtgcagaaagagagaaggagatggcctccatgaaggaggagttcacacgcctcaaagaggcgctagagaagtccgaggctcrccgcaaggagctggaggagaagatggtgtccctgctgcaggagaagaatgacctgcagctccaagtgcaggcggaacaagacaacctggcagatgctgag

SEQ ID NO: 9440 - DNA, 201 bp, Homo sapiens
cgctccacccatccccactttgtacgttgtatcatccctaatgagacaaagtctccaggggtgatggacaaccccctggtcatgcaccagctgcgctgcartggtgtgctggagggcatccgcatctgcaggaaaggcttccccaaccgcatcctctacggggacttccggcagaggtatcgcatcctgaacccagcggcc

SEQ ID NO: 9441 - DNA, 201 bp, Homo sapiens
cgggcaagggcaccctggaggaccagatcatccaggccaaccctgctctggaggcctttggcaatgccaagaccgtccggaacgacaactcctcccgcttygggaaattcattcgaattcattttggggcaacaggaaagttggcatctgcagacatagagacctatcttctggaaaaatccagagttattttccagctga

SEQ ID NO: 9442 - DNA, 201 bp, Homo sapiens
ggagaagatggtgtccctgctgcaggagaagaatgacctgcagctccaagtgcaggcggaacaagacaacctggcagatgctgaggagcgctgtgatcagstgatcaaaaacaagattcagctggaggccaaggtgaaggagatgaacgagaggctggaggatgaggaggagatgaatgctgagctcactgccaagaagcg

SEQ ID NO: 9443 - DNA, 201 bp, Homo sapiens
tgccggcatcgtggactacaacatcattggctggctgcagaagaacaaggatcctctcaatgagactgtcgtgggcttgtatcagaagtcttccctcaagytgctcagcaccctgtttgccaactatgctggggctgatgcgcctattgagaagggcaaaggcaaggccaagaaaggctcgtcctttcagactgtgtcagc

SEQ ID NO: 9444 - DNA, 201 bp, Homo sapiens
gatggcagtctttggggctgccgccccctacctgcgcaagtcagagaaggagcggctagaagcgcagaccaggccttttgacctcaagaaggatgtcttcrtgcctgatgacaaacaggagtttgtcaaggccaagatcgtgtctcgagagggtggcaaagtcactgccgagactgagtatggcaagacagtgaccgtgaa

SEQ ID NO: 9445 - DNA, 201 bp, Homo sapiens
ctccattgatgacgctgaggagctcatggccactgataacgcttttgatgtgctgggcttcacttcagaggagaaaaactccatgtataagctgacaggcrccatcatgcactttggaaacatgaagttcaagctgaagcagcgggaggagcaggcggagccagacggcactgaagaggctgacaagtctgcctacctcat

SEQ ID NO: 9446 - DNA, 201 bp, Homo sapiens
agaacatcgccatcgtggagcggcgcaacaacctgctgcaggctgagctggaggagttgcgtgccgtggtggagcagacagagcggtcccggaagctggcrgagcaggagctgattgagactagtgagcgggtgcagctgctgcattcccagaacaccagcctcatcaaccagaagaagaagatggatgctgacctgtccc

SEQ ID NO: 9447 - DNA, 201 bp, Homo sapiens
ggggtgggggtgccctgctgccccatatatacagcccctgagaccaggtctggctccacagctctgtcctgctctgtgtctttccctgctgctctcaggtyccctgcaggccttggcccctttcctcatctgtagacacacttgagtagcccaggcacagccatgggagattcggagatggcagtctttggggctgccgcc

SEQ ID NO: 9448 - DNA, 105 bp, Homo sapiens
ttgatctgctcagccctggaggtgccagcaaagccccatgctggagcctgtgtaacagctccttgggaggaagcagaataaagcaattttccttgaagccragat

SEQ ID NO: 9449 - DNA, 201 bp, Homo sapiens
ctctgcacagggaaaatctgaacaagctgatgaccaacttgcgctccacccatccccactttgtacgttgtatcatccctaatgagacaaagtctccaggsgtgatggacaaccccctggtcatgcaccagctgcgctgcaatggtgtgctggagggcatccgcatctgcaggaaaggcttccccaaccgcatcctctacg

SEQ ID NO: 9450 - DNA, 201 bp, Homo sapiens
gcatctgcaggaaaggcttccccaaccgcatcctctacggggacttccggcagaggtatcgcatcctgaacccagcggccatccctgagggacagttcatkgatagcaggaagggggcagagaagctgctcagctccctggacattgatcacaaccagtacaagtttggccacaccaaggtgttcttcaaggccgggctgc

SEQ ID NO: 9451 - DNA, 201 bp, Homo sapiens
ctggacattgatcacaaccagtacaagtttggccacaccaaggtgttcttcaaggccgggctgctggggctgctggaggaaatgagggacgagaggctgarccgcatcatcacgcgtatccaggcccagtcccgaggtgtgctcgccagaatggagtacaaaaagctgctggaacgtagagactccctgctggtaatccag

SEQ ID NO: 9452 - DNA, 201 bp, Homo sapiens
caagaattggccctggatgaagctctacttcaagatcaagccgctgctgaagagtgcagaaagagagaaggagatggcctccatgaaggaggagttcacasgcctcaaagaggcgctagagaagtccgaggctcgccgcaaggagctggaggagaagatggtgtccctgctgcaggagaagaatgacctgcagctccaagt

SEQ ID NO: 9453 - DNA, 201 bp, Homo sapiens
aagaattggccctggatgaagctctacttcaagatcaagccgctgctgaagagtgcagaaagagagaaggagatggcctccatgaaggaggagttcacacscctcaaagaggcgctagagaagtccgaggctcgccgcaaggagctggaggagaagatggtgtccctgctgcaggagaagaatgacctgcagctccaagtg

SEQ ID NO: 9454 - DNA, 201 bp, Homo sapiens
aagccgctgctgaagagtgcagaaagagagaaggagatggcctccatgaaggaggagttcacacgcctcaaagaggcgctagagaagtccgaggctcgccrcaaggagctggaggagaagatggtgtccctgctgcaggagaagaatgacctgcagctccaagtgcaggcggaacaagacaacctggcagatgctgaggag

SEQ ID NO: 9455 - DNA, 201 bp, Homo sapiens
agaatgacctgcagctccaagtgcaggcggaacaagacaacctggcagatgctgaggagcgctgtgatcagctgatcaaaaacaagattcagctggaggcyaaggtgaaggagatgaacgagaggctggaggatgaggaggagatgaatgctgagctcactgccaagaagcgcaagctggaagatgagtgctcagagctca

SEQ ID NO: 9456 - DNA, 201 bp, Homo sapiens
cccgggcaagggcaccctggaggaccagatcatccaggccaaccctgctctggaggcctttggcaatgccaagaccgtccggaacgacaactcctcccgcytcgggaaattcattcgaattcattttggggcaacaggaaagttggcatctgcagacatagagacctatcttctggaaaaatccagagttattttccagct

SEQ ID NO: 9457 - DNA, 201 bp, Homo sapiens
caacctggcagatgctgaggagcgctgtgatcagctgatcaaaaacaagattcagctggaggccaaggtgaaggagatgaacgagaggctggaggatgagraggagatgaatgctgagctcactgccaagaagcgcaagctggaagatgagtgctcagagctcaaaagggacatcgatgatctggagctgacactggccaa

SEQ ID NO: 9458 - DNA, 201 bp, Homo sapiens
atgccggcatcgtggactacaacatcattggctggctgcagaagaacaaggatcctctcaatgagactgtcgtgggcttgtatcagaagtcttccctcaasctgctcagcaccctgtttgccaactatgctggggctgatgcgcctattgagaagggcaaaggcaaggccaagaaaggctcgtcctttcagactgtgtcag

SEQ ID NO: 9459 - DNA, 201 bp, Homo sapiens
tcaaaaacaagattcagctggaggccaaggtgaaggagatgaacgagaggctggaggatgaggaggagatgaatgctgagctcactgccaagaagcgcaasctggaagatgagtgctcagagctcaaaagggacatcgatgatctggagctgacactggccaaagtggagaaggagaaacacgcaacagagaacaaggtga

SEQ ID NO: 9460 - DNA, 201 bp, Homo sapiens
tgctctgtgtctttccctgctgctctcaggtcccctgcaggccttggcccctttcctcatctgtagacacacttgagtagcccaggcacagccatgggagmttcggagatggcagtctttggggctgccgccccctacctgcgcaagtcagagaaggagcggctagaagcgcagaccaggccttttgacctcaagaaggat

SEQ ID NO: 9461 - DNA, 201 bp, Homo sapiens
atctggagctgacactggccaaagtggagaaggagaaacacgcaacagagaacaaggtgaaaaacctgacagaggagatggctgggctggatgagatcatygccaagctgaccaaggagaagaaagctctgcaagaggcccaccaacaggctctggatgaccttcaggccgaggaggacaaggtcaacaccctgactaagg

SEQ ID NO: 9462 - DNA, 201 bp, Homo sapiens
ctgctcagctccctggacattgatcacaaccagtacaagtttggccacaccaaggtgttcttcaaggccgggctgctggggctgctggaggaaatgagggrcgagaggctgagccgcatcatcacgcgtatccaggcccagtcccgaggtgtgctcgccagaatggagtacaaaaagctgctggaacgtagagactccctg

SEQ ID NO: 9463 - DNA, 201 bp, Homo sapiens
tgctcagctccctggacattgatcacaaccagtacaagtttggccacaccaaggtgttcttcaaggccgggctgctggggctgctggaggaaatgagggabgagaggctgagccgcatcatcacgcgtatccaggcccagtcccgaggtgtgctcgccagaatggagtacaaaaagctgctggaacgtagagactccctgc

SEQ ID NO: 9464 - DNA, 201 bp, Homo sapiens
aaccagtacaagtttggccacaccaaggtgttcttcaaggccgggctgctggggctgctggaggaaatgagggacgagaggctgagccgcatcatcacgcrtatccaggcccagtcccgaggtgtgctcgccagaatggagtacaaaaagctgctggaacgtagagactccctgctggtaatccagtggaacattcgggcc

SEQ ID NO: 9465 - DNA, 201 bp, Homo sapiens
tggaagaggagtgcatgttccccaaggccaccgacatgaccttcaaggccaagctgtttgacaaccacctgggcaaatccgccaacttccagaagccacgmaatatcaaggggaagcctgaagcccacttctccctgatccactatgccggcatcgtggactacaacatcattggctggctgcagaagaacaaggatcctc

SEQ ID NO: 9466 - DNA, 201 bp, Homo sapiens
ccagtcccgaggtgtgctcgccagaatggagtacaaaaagctgctggaacgtagagactccctgctggtaatccagtggaacattcgggccttcatggggrtcaagaattggccctggatgaagctctacttcaagatcaagccgctgctgaagagtgcagaaagagagaaggagatggcctccatgaaggaggagttcac

SEQ ID NO: 9467 - DNA, 201 bp, Homo sapiens
ggctcctggatgatctacacctactcgggcctcttctgtgtcaccgtcaacccttacaagtggctgccggtgtacactcctgaggtggtggctgcctaccrgggcaagaagaggagcgaggccccgccccacatcttctccatctccgacaacgcctatcagtacatgctgacagacagagaaaaccagtccatcctgatc

SEQ ID NO: 9468 - DNA, 201 bp, Homo sapiens
cgggccttcatgggggtcaagaattggccctggatgaagctctacttcaagatcaagccgctgctgaagagtgcagaaagagagaaggagatggcctccaygaaggaggagttcacacgcctcaaagaggcgctagagaagtccgaggctcgccgcaaggagctggaggagaagatggtgtccctgctgcaggagaagaat

SEQ ID NO: 9469 - DNA, 201 bp, Homo sapiens
ctgataacgcttttgatgtgctgggcttcacttcagaggagaaaaactccatgtataagctgacaggcgccatcatgcactttggaaacatgaagttcaarctgaagcagcgggaggagcaggcggagccagacggcactgaagaggctgacaagtctgcctacctcatggggctgaactcagccgacctgctcaaggggc

SEQ ID NO: 9470 - DNA, 201 bp, Homo sapiens
agaaggagggcatcgagtggacattcattgactttggcatggacctgcaggcctgcattgacctcatcgagaagcccatgggcatcatgtccatcctggargaggagtgcatgttccccaaggccaccgacatgaccttcaaggccaagctgtttgacaaccacctgggcaaatccgccaacttccagaagccacgcaata

SEQ ID NO: 9471 - DNA, 201 bp, Homo sapiens
agctgcagtcagccctggaggaggccgaggcctccctggagcacgaggagggcaagatcctccgggcccagctggagttcaaccagatcaaggcagagatygagcggaagctggcagagaaggacgaggagatggaacaggccaagcgcaaccacctgcgggtggtggactcgctgcagacctccctggacgcagagacac

SEQ ID NO: 9472 - DNA, 201 bp, Homo sapiens
caaaaacaagattcagctggaggccaaggtgaaggagatgaacgagaggctggaggatgaggaggagatgaatgctgagctcactgccaagaagcgcaagbtggaagatgagtgctcagagctcaaaagggacatcgatgatctggagctgacactggccaaagtggagaaggagaaacacgcaacagagaacaaggtgaa

SEQ ID NO: 9473 - DNA, 201 bp, Homo sapiens
cccagaagcaagtcaagagcctccagagcttgttgaaggacacccagattcagctggacgatgcagtccgtgccaacgacgacctgaaggagaacatcgcmatcgtggagcggcgcaacaacctgctgcaggctgagctggaggagttgcgtgccgtggtggagcagacagagcggtcccggaagctggcggagcaggagc

SEQ ID NO: 9474 - DNA, 201 bp, Homo sapiens
tcatccctaatgagacaaagtctccaggggtgatggacaaccccctggtcatgcaccagctgcgctgcaatggtgtgctggagggcatccgcatctgcagkaaaggcttccccaaccgcatcctctacggggacttccggcagaggtatcgcatcctgaacccagcggccatccctgagggacagttcattgatagcagga

SEQ ID NO: 9475 - DNA, 201 bp, Homo sapiens
gcctgaagcccacttctccctgatccactatgccggcatcgtggactacaacatcattggctggctgcagaagaacaaggatcctctcaatgagactgtcrtgggcttgtatcagaagtcttccctcaagctgctcagcaccctgtttgccaactatgctggggctgatgcgcctattgagaagggcaaaggcaaggccaa

SEQ ID NO: 9476 - DNA, 201 bp, Homo sapiens
gcctatcagtacatgctgacagacagagaaaaccagtccatcctgatcaccggagaatccggagcagggaagacagtcaacaccaagagggtcatccagtmctttgctgttattgcagccattggggaccgcagcaagaaggaccagagcccgggcaagggcaccctggaggaccagatcatccaggccaaccctgctctg

SEQ ID NO: 9477 - DNA, 201 bp, Homo sapiens
ggaggagcaggcggagccagacggcactgaagaggctgacaagtctgcctacctcatggggctgaactcagccgacctgctcaaggggctgtgccaccctygggtgaaagtgggcaatgagtacgtcaccaaggggcagaatgtccagcaggtgatatatgccactggggcactggccaaggcagtgtatgagaggatgtt

SEQ ID NO: 9478 - DNA, 201 bp, Homo sapiens
cagaagtatgaggagtcgcagtcggagctggagtcctcgcagaaggaggctcgctccctcagcacagagctcttcaaactcaagaacgcctatgaggagtscctggaacatctggagaccttcaagcgggagaacaaaaacctgcaggaggagatctccgacttgactgagcagttgggttccagcggaaagactatccat

SEQ ID NO: 9479 - DNA, 201 bp, Homo sapiens
ggagcaggcggagccagacggcactgaagaggctgacaagtctgcctacctcatggggctgaactcagccgacctgctcaaggggctgtgccaccctcggktgaaagtgggcaatgagtacgtcaccaaggggcagaatgtccagcaggtgatatatgccactggggcactggccaaggcagtgtatgagaggatgttcaa

SEQ ID NO: 9480 - DNA, 201 bp, Homo sapiens
cgagatcttcgatttcaacagctttgagcagctctgcatcaacttcaccaacgagaagctgcagcagttcttcaaccaccacatgtttgtgctggagcagraggagtacaagaaggagggcatcgagtggacattcattgactttggcatggacctgcaggcctgcattgacctcatcgagaagcccatgggcatcatgtc

SEQ ID NO: 9481 - DNA, 201 bp, Homo sapiens
agatcctggccgagtggaagcagaagtatgaggagtcgcagtcggagctggagtcctcgcagaaggaggctcgctccctcagcacagagctcttcaaactyaagaacgcctatgaggagtccctggaacatctggagaccttcaagcgggagaacaaaaacctgcaggaggagatctccgacttgactgagcagttgggtt

SEQ ID NO: 9482 - DNA, 201 bp, Homo sapiens
cgcatctgcaggaaaggcttccccaaccgcatcctctacggggacttccggcagaggtatcgcatcctgaacccagcggccatccctgagggacagttcaytgatagcaggaagggggcagagaagctgctcagctccctggacattgatcacaaccagtacaagtttggccacaccaaggtgttcttcaaggccgggctg

SEQ ID NO: 9483 - DNA, 201 bp, Homo sapiens
catcctgatcaccggagaatccggagcagggaagacagtcaacaccaagagggtcatccagtactttgctgttattgcagccattggggaccgcagcaagmaggaccagagcccgggcaagggcaccctggaggaccagatcatccaggccaaccctgctctggaggcctttggcaatgccaagaccgtccggaacgacaa

SEQ ID NO: 9484 - DNA, 201 bp, Homo sapiens
acaagacaacctggcagatgctgaggagcgctgtgatcagctgatcaaaaacaagattcagctggaggccaaggtgaaggagatgaacgagaggctggagratgaggaggagatgaatgctgagctcactgccaagaagcgcaagctggaagatgagtgctcagagctcaaaagggacatcgatgatctggagctgacact

SEQ ID NO: 9485 - DNA, 201 bp, Homo sapiens
aagtggctgccggtgtacactcctgaggtggtggctgcctaccggggcaagaagaggagcgaggccccgccccacatcttctccatctccgacaacgcctrtcagtacatgctgacagacagagaaaaccagtccatcctgatcaccggagaatccggagcagggaagacagtcaacaccaagagggtcatccagtacttt

SEQ ID NO: 9486 - DNA, 201 bp, Homo sapiens
caagggcaccctggaggaccagatcatccaggccaaccctgctctggaggcctttggcaatgccaagaccgtccggaacgacaactcctcccgcttcgggmaattcattcgaattcattttggggcaacaggaaagttggcatctgcagacatagagacctatcttctggaaaaatccagagttattttccagctgaaagc

SEQ ID NO: 9487 - DNA, 201 bp, Homo sapiens
ctggaggaccagatcatccaggccaaccctgctctggaggcctttggcaatgccaagaccgtccggaacgacaactcctcccgcttcgggaaattcattcraattcattttggggcaacaggaaagttggcatctgcagacatagagacctatcttctggaaaaatccagagttattttccagctgaaagcagagagagat

SEQ ID NO: 9488 - DNA, 201 bp, Homo sapiens
ggagaatccggagcagggaagacagtcaacaccaagagggtcatccagtactttgctgttattgcagccattggggaccgcagcaagaaggaccagagccygggcaagggcaccctggaggaccagatcatccaggccaaccctgctctggaggcctttggcaatgccaagaccgtccggaacgacaactcctcccgcttc

SEQ ID NO: 9489 - DNA, 201 bp, Homo sapiens
caagctgtttgacaaccacctgggcaaatccgccaacttccagaagccacgcaatatcaaggggaagcctgaagcccacttctccctgatccactatgccrgcatcgtggactacaacatcattggctggctgcagaagaacaaggatcctctcaatgagactgtcgtgggcttgtatcagaagtcttccctcaagctgct

SEQ ID NO: 9490 - DNA, 201 bp, Homo sapiens
tgacagacagagaaaaccagtccatcctgatcaccggagaatccggagcagggaagacagtcaacaccaagagggtcatccagtactttgctgttattgcrgccattggggaccgcagcaagaaggaccagagcccgggcaagggcaccctggaggaccagatcatccaggccaaccctgctctggaggcctttggcaatg

SEQ ID NO: 9491 - DNA, 201 bp, Homo sapiens
tgaggagcgctgtgatcagctgatcaaaaacaagattcagctggaggccaaggtgaaggagatgaacgagaggctggaggatgaggaggagatgaatgctragctcactgccaagaagcgcaagctggaagatgagtgctcagagctcaaaagggacatcgatgatctggagctgacactggccaaagtggagaaggagaa

SEQ ID NO: 9492 - DNA, 201 bp, Homo sapiens
agtgcaggcggaacaagacaacctggcagatgctgaggagcgctgtgatcagctgatcaaaaacaagattcagctggaggccaaggtgaaggagatgaacragaggctggaggatgaggaggagatgaatgctgagctcactgccaagaagcgcaagctggaagatgagtgctcagagctcaaaagggacatcgatgatct

SEQ ID NO: 9493 - DNA, 201 bp, Homo sapiens
caagccgctgctgaagagtgcagaaagagagaaggagatggcctccatgaaggaggagttcacacgcctcaaagaggcgctagagaagtccgaggctcgcygcaaggagctggaggagaagatggtgtccctgctgcaggagaagaatgacctgcagctccaagtgcaggcggaacaagacaacctggcagatgctgagga

SEQ ID NO: 9494 - DNA, 201 bp, Homo sapiens
ggaggccaaggtgaaggagatgaacgagaggctggaggatgaggaggagatgaatgctgagctcactgccaagaagcgcaagctggaagatgagtgctcaragctcaaaagggacatcgatgatctggagctgacactggccaaagtggagaaggagaaacacgcaacagagaacaaggtgaaaaacctgacagaggagat

SEQ ID NO: 9495 - DNA, 201 bp, Homo sapiens
accaggtgatgcagcagaacccacccaagttcgacaaaatcgaggacatggccatgctgaccttcctgcatgagcccgcggtgctctacaacctcaaggakcgctacggctcctggatgatctacacctactcgggcctcttctgtgtcaccgtcaacccttacaagtggctgccggtgtacactcctgaggtggtggctg

SEQ ID NO: 9496 - DNA, 201 bp, Homo sapiens
gaggagcaggcggagccagacggcactgaagaggctgacaagtctgcctacctcatggggctgaactcagccgacctgctcaaggggctgtgccaccctckggtgaaagtgggcaatgagtacgtcaccaaggggcagaatgtccagcaggtgatatatgccactggggcactggccaaggcagtgtatgagaggatgttc

SEQ ID NO: 9497 - DNA, 201 bp, Homo sapiens
tttggcaatgccaagaccgtccggaacgacaactcctcccgcttcgggaaattcattcgaattcattttggggcaacaggaaagttggcatctgcagacayagagacctatcttctggaaaaatccagagttattttccagctgaaagcagagagagattatcacattttctaccaaatcctgtctaacaaaaagcctgag

SEQ ID NO: 9498 - DNA, 201 bp, Homo sapiens
gaccaccgtggcctccattgatgacgctgaggagctcatggccactgataacgcttttgatgtgctgggcttcacttcagaggagaaaaactccatgtatragctgacaggcgccatcatgcactttggaaacatgaagttcaagctgaagcagcgggaggagcaggcggagccagacggcactgaagaggctgacaagtc

SEQ ID NO: 9499 - DNA, 201 bp, Homo sapiens
cacttgagtagcccaggcacagccatgggagattcggagatggcagtctttggggctgccgccccctacctgcgcaagtcagagaaggagcggctagaagygcagaccaggccttttgacctcaagaaggatgtcttcgtgcctgatgacaaacaggagtttgtcaaggccaagatcgtgtctcgagagggtggcaaagtc

SEQ ID NO: 9500 - DNA, 201 bp, Homo sapiens
tcacttcagaggagaaaaactccatgtataagctgacaggcgccatcatgcactttggaaacatgaagttcaagctgaagcagcgggaggagcaggcggarccagacggcactgaagaggctgacaagtctgcctacctcatggggctgaactcagccgacctgctcaaggggctgtgccaccctcgggtgaaagtgggca

SEQ ID NO: 9501 - DNA, 201 bp, Homo sapiens
cttttgacctcaagaaggatgtcttcgtgcctgatgacaaacaggagtttgtcaaggccaagatcgtgtctcgagagggtggcaaagtcactgccgagacygagtatggcaagacagtgaccgtgaaggaggaccaggtgatgcagcagaacccacccaagttcgacaaaatcgaggacatggccatgctgaccttcctgc

SEQ ID NO: 9502 - DNA, 201 bp, Homo sapiens
gggctgatgcgcctattgagaagggcaaaggcaaggccaagaaaggctcgtcctttcagactgtgtcagctctgcacagggaaaatctgaacaagctgatraccaacttgcgctccacccatccccactttgtacgttgtatcatccctaatgagacaaagtctccaggggtgatggacaaccccctggtcatgcaccagc

SEQ ID NO: 9503 - DNA, 201 bp, Homo sapiens
atccctgagggacagttcattgatagcaggaagggggcagagaagctgctcagctccctggacattgatcacaaccagtacaagtttggccacaccaaggkgttcttcaaggccgggctgctggggctgctggaggaaatgagggacgagaggctgagccgcatcatcacgcgtatccaggcccagtcccgaggtgtgctc

SEQ ID NO: 9504 - DNA, 201 bp, Homo sapiens
ggaggagtacaagaaggagggcatcgagtggacattcattgactttggcatggacctgcaggcctgcattgacctcatcgagaagcccatgggcatcatgyccatcctggaagaggagtgcatgttccccaaggccaccgacatgaccttcaaggccaagctgtttgacaaccacctgggcaaatccgccaacttccagaa

SEQ ID NO: 9505 - DNA, 201 bp, Homo sapiens
agaattggccctggatgaagctctacttcaagatcaagccgctgctgaagagtgcagaaagagagaaggagatggcctccatgaaggaggagttcacacgsctcaaagaggcgctagagaagtccgaggctcgccgcaaggagctggaggagaagatggtgtccctgctgcaggagaagaatgacctgcagctccaagtgc

SEQ ID NO: 9506 - DNA, 201 bp, Homo sapiens
ggtgatggacaaccccctggtcatgcaccagctgcgctgcaatggtgtgctggagggcatccgcatctgcaggaaaggcttccccaaccgcatcctctacrgggacttccggcagaggtatcgcatcctgaacccagcggccatccctgagggacagttcattgatagcaggaagggggcagagaagctgctcagctccct

SEQ ID NO: 9507 - DNA, 201 bp, Homo sapiens
atttcaacagctttgagcagctctgcatcaacttcaccaacgagaagctgcagcagttcttcaaccaccacatgtttgtgctggagcaggaggagtacaasaaggagggcatcgagtggacattcattgactttggcatggacctgcaggcctgcattgacctcatcgagaagcccatgggcatcatgtccatcctggaag

SEQ ID NO: 9508 - DNA, 201 bp, Homo sapiens
tcagtacatgctgacagacagagaaaaccagtccatcctgatcaccggagaatccggagcagggaagacagtcaacaccaagagggtcatccagtactttrctgttattgcagccattggggaccgcagcaagaaggaccagagcccgggcaagggcaccctggaggaccagatcatccaggccaaccctgctctggaggc

SEQ ID NO: 9509 - DNA, 201 bp, Homo sapiens
ttcagcggactgaggagctcgaggaggccaagaagaagctggcccagcggctgcaggaagctgaggaggccgtggaggctgttaatgccaagtgctcctcrctggagaagaccaagcaccggctacagaatgagatcgaggacttgatggtggacgtagagcgctccaatgctgctgctgcagccctggacaagaagcaga

SEQ ID NO: 9510 - DNA, 201 bp, Homo sapiens
gactatccatgagctggagaaggtccgaaagcagctggaggccgagaagatggagctgcagtcagccctggaggaggccgaggcctccctggagcacgagragggcaagatcctccgggcccagctggagttcaaccagatcaaggcagagatcgagcggaagctggcagagaaggacgaggagatggaacaggccaagcg

SEQ ID NO: 9511 - DNA, 201 bp, Homo sapiens
ggtaatccagtggaacattcgggccttcatgggggtcaagaattggccctggatgaagctctacttcaagatcaagccgctgctgaagagtgcagaaagaragaaggagatggcctccatgaaggaggagttcacacgcctcaaagaggcgctagagaagtccgaggctcgccgcaaggagctggaggagaagatggtgtc

SEQ ID NO: 9512 - DNA, 201 bp, Homo sapiens
ccgagcagatcgccctcaagggcggcaagaagcagctgcagaagctggaagcgcgggtgcgggagctggagaatgagctggaggccgagcagaagcgcaaygcagagtcggtgaagggcatgaggaagagcgagcggcgcatcaaggagctcacctaccagacggaggaggacaggaaaaacctgctgcggctgcaggacc

SEQ ID NO: 9513 - DNA, 201 bp, Homo sapiens
gatcaagccgctgctgaagagtgcagaaagagagaaggagatggcctccatgaaggaggagttcacacgcctcaaagaggcgctagagaagtccgaggctsgccgcaaggagctggaggagaagatggtgtccctgctgcaggagaagaatgacctgcagctccaagtgcaggcggaacaagacaacctggcagatgctga

SEQ ID NO: 9514 - DNA, 201 bp, Homo sapiens; identical to SEQ ID NO: 9465

SEQ ID NO: 9515 - DNA, 201 bp, Homo sapiens; identical to SEQ ID NO: 9467

SEQ ID NO: 9516 - DNA, 201 bp, Homo sapiens; identical to SEQ ID NO: 9469

SEQ ID NO: 9517 - DNA, 201 bp, Homo sapiens; identical to SEQ ID NO: 9419

SEQ ID NO: 9518 - DNA, 201 bp, Homo sapiens; identical to SEQ ID NO: 9470

SEQ ID NO: 9519 - DNA, 201 bp, Homo sapiens; identical to SEQ ID NO: 9422

SEQ ID NO: 9520 - DNA, 201 bp, Homo sapiens; identical to SEQ ID NO: 9425

SEQ ID NO: 9521 - DNA, 201 bp, Homo sapiens
gtcaacaagctgcgggccaagagccgtgacattggcacgaagagatgcggtttcaccatgttggccaggctggtcttgaactcctgaccttgtgatccacycgcctcagcctcccaaaggcttgaatgaggagtagctttgccacatcttgatctgctcagccctggaggtgccagcaaagccccatgctggagcctgtgt

SEQ ID NO: 9522 - DNA, 201 bp, Homo sapiens; identical to SEQ ID NO: 9426

SEQ ID NO: 9523 - DNA, 201 bp, Homo sapiens
aggagcgggcggacatcgccgagtcccaggtcaacaagctgcgggccaagagccgtgacattggcacgaagagatgcggtttcaccatgttggccaggctrgtcttgaactcctgaccttgtgatccactcgcctcagcctcccaaaggcttgaatgaggagtagctttgccacatcttgatctgctcagccctggaggtg

SEQ ID NO: 9524 - DNA, 201 bp, Homo sapiens
gagatgcggtttcaccatgttggccaggctggtcttgaactcctgaccttgtgatccactcgcctcagcctcccaaaggcttgaatgaggagtagctttgmcacatcttgatctgctcagccctggaggtgccagcaaagccccatgctggagcctgtgtaacagctccttgggaggaagcagaataaagcaattttcctt

SEQ ID NO: 9525 - DNA, 201 bp, Homo sapiens
tcatccctaatgagacaaagtctccaggggtgatggacaaccccctggtcatgcaccagctgcgctgcaatggtgtgctggagggcatccgcatctgcagkaaaggcttccccaaccgcatcctctacggggacttccggcagaggtgggtgaaaaacctgacagaggagatggctgggctggatgagatcattgccaagc

SEQ ID NO: 9526 - DNA, 201 bp, Homo sapiens; identical to SEQ ID NO: 9428

SEQ ID NO: 9527 - DNA, 201 bp, Homo sapiens; identical to SEQ ID NO: 9429

SEQ ID NO: 9528 - DNA, 201 bp, Homo sapiens; identical to SEQ ID NO: 9430

SEQ ID NO: 9529 - DNA, 201 bp, Homo sapiens; identical to SEQ ID NO: 9431

SEQ ID NO: 9530 - DNA, 201 bp, Homo sapiens; identical to SEQ ID NO: 9432

SEQ ID NO: 9531 - DNA, 201 bp, Homo sapiens; identical to SEQ ID NO: 9475

SEQ ID NO: 9532 - DNA, 201 bp, Homo sapiens; identical to SEQ ID NO: 9433

SEQ ID NO: 9533 - DNA, 201 bp, Homo sapiens; identical to SEQ ID NO: 9434

SEQ ID NO: 9534 - DNA, 201 bp, Homo sapiens; identical to SEQ ID NO: 9476

SEQ ID NO: 9535 - DNA, 201 bp, Homo sapiens; identical to SEQ ID NO: 9435

SEQ ID NO: 9536 - DNA, 201 bp, Homo sapiens; identical to SEQ ID NO: 9436

SEQ ID NO: 9537 - DNA, 201 bp, Homo sapiens; identical to SEQ ID NO: 9477

SEQ ID NO: 9538 - DNA, 201 bp, Homo sapiens; identical to SEQ ID NO: 9479

SEQ ID NO: 9539 - DNA, 201 bp, Homo sapiens; identical to SEQ ID NO: 9480

SEQ ID NO: 9540 - DNA, 201 bp, Homo sapiens; identical to SEQ ID NO: 9438

SEQ ID NO: 9541 - DNA, 201 bp, Homo sapiens; identical to SEQ ID NO: 9483

SEQ ID NO: 9542 - DNA, 201 bp, Homo sapiens
cgctccacccatccccactttgtacgttgtatcatccctaatgagacaaagtctccaggggtgatggacaaccccctggtcatgcaccagctgcgctgcartggtgtgctggagggcatccgcatctgcaggaaaggcttccccaaccgcatcctctacggggacttccggcagaggtgggtgaaaaacctgacagaggag

SEQ ID NO: 9543 - DNA, 201 bp, Homo sapiens; identical to SEQ ID NO: 9441

SEQ ID NO: 9544 - DNA, 201 bp, Homo sapiens; identical to SEQ ID NO: 9485

SEQ ID NO: 9545 - DNA, 201 bp, Homo sapiens; identical to SEQ ID NO: 9486

SEQ ID NO: 9546 - DNA, 201 bp, Homo sapiens; identical to SEQ ID NO: 9487

SEQ ID NO: 9547 - DNA, 201 bp, Homo sapiens; identical to SEQ ID NO: 9488

SEQ ID NO: 9548 - DNA, 201 bp, Homo sapiens; identical to SEQ ID NO: 9443

SEQ ID NO: 9549 - DNA, 201 bp, Homo sapiens; identical to SEQ ID NO: 9489

SEQ ID NO: 9550 - DNA, 201 bp, Homo sapiens; identical to SEQ ID NO: 9444

SEQ ID NO: 9551 - DNA, 201 bp, Homo sapiens; identical to SEQ ID NO: 9490

SEQ ID NO: 9552 - DNA, 201 bp, Homo sapiens; identical to SEQ ID NO: 9445

SEQ ID NO: 9553 - DNA, 201 bp, Homo sapiens; identical to SEQ ID NO: 9447

SEQ ID NO: 9554 - DNA, 101 bp, Homo sapiens
ttgatctgctcagccctggaggtgccagcaaagccccatgctggagcctgtgtaacagctccttgggaggaagcagaataaagcaattttccttgaagccr

SEQ ID NO: 9555 - DNA, 201 bp, Homo sapiens; identical to SEQ ID NO: 9495

SEQ ID NO: 9556 - DNA, 201 bp, Homo sapiens; identical to SEQ ID NO: 9449

SEQ ID NO: 9557 - DNA, 201 bp, Homo sapiens; identical to SEQ ID NO: 9496

SEQ ID NO: 9558 - DNA, 201 bp, Homo sapiens; identical to SEQ ID NO: 9497

SEQ ID NO: 9559 - DNA, 201 bp, Homo sapiens; identical to SEQ ID NO: 9498

SEQ ID NO: 9560 - DNA, 201 bp, Homo sapiens; identical to SEQ ID NO: 9499

SEQ ID NO: 9561 - DNA, 201 bp, Homo sapiens; identical to SEQ ID NO: 9500

SEQ ID NO: 9562 - DNA, 201 bp, Homo sapiens; identical to SEQ ID NO: 9501

SEQ ID NO: 9563 - DNA, 201 bp, Homo sapiens; identical to SEQ ID NO: 9502

SEQ ID NO: 9564 - DNA, 201 bp, Homo sapiens; identical to SEQ ID NO: 9456

SEQ ID NO: 9565 - DNA, 201 bp, Homo sapiens; identical to SEQ ID NO: 9458

SEQ ID NO: 9566 - DNA, 201 bp, Homo sapiens; identical to SEQ ID NO: 9504

SEQ ID NO: 9567 - DNA, 201 bp, Homo sapiens; identical to SEQ ID NO: 9460

SEQ ID NO: 9568 - DNA, 201 bp, Homo sapiens
ggtgatggacaaccccctggtcatgcaccagctgcgctgcaatggtgtgctggagggcatccgcatctgcaggaaaggcttccccaaccgcatcctctacrgggacttccggcagaggtgggtgaaaaacctgacagaggagatggctgggctggatgagatcattgccaagctgaccaaggagaagaaagctctgcaaga

SEQ ID NO: 9569 - DNA, 201 bp, Homo sapiens; identical to SEQ ID NO: 9507

SEQ ID NO: 9570 - DNA, 201 bp, Homo sapiens; identical to SEQ ID NO: 9508

SEQ ID NO: 9571 - DNA, 201 bp, Homo sapiens
tctgcaggaaaggcttccccaaccgcatcctctacggggacttccggcagaggtgggtgaaaaacctgacagaggagatggctgggctggatgagatcatygccaagctgaccaaggagaagaaagctctgcaagaggcccaccaacaggctctggatgaccttcaggccgaggaggacaaggtcaacaccctgactaagg

SEQ ID NO: 9572 - DNA, 201 bp, Homo sapiens; identical to SEQ ID NO: 9419

SEQ ID NO: 9573 - DNA, 201 bp, Homo sapiens; identical to SEQ ID NO: 9420

SEQ ID NO: 9574 - DNA, 201 bp, Homo sapiens; identical to SEQ ID NO: 9421

SEQ ID NO: 9575 - DNA, 201 bp, Homo sapiens; identical to SEQ ID NO: 9422

SEQ ID NO: 9576 - DNA, 201 bp, Homo sapiens; identical to SEQ ID NO: 9423

SEQ ID NO: 9577 - DNA, 201 bp, Homo sapiens; identical to SEQ ID NO: 9424

SEQ ID NO: 9578 - DNA, 201 bp, Homo sapiens; identical to SEQ ID NO: 9425

SEQ ID NO: 9579 - DNA, 201 bp, Homo sapiens; identical to SEQ ID NO: 9521

SEQ ID NO: 9580 - DNA, 201 bp, Homo sapiens; identical to SEQ ID NO: 9426

SEQ ID NO: 9581 - DNA, 201 bp, Homo sapiens; identical to SEQ ID NO: 9523

SEQ ID NO: 9582 - DNA, 201 bp, Homo sapiens; identical to SEQ ID NO: 9524

SEQ ID NO: 9583 - DNA, 201 bp, Homo sapiens; identical to SEQ ID NO: 9428

SEQ ID NO: 9584 - DNA, 201 bp, Homo sapiens; identical to SEQ ID NO: 9429

SEQ ID NO: 9585 - DNA, 201 bp, Homo sapiens; identical to SEQ ID NO: 9430

SEQ ID NO: 9586 - DNA, 201 bp, Homo sapiens; identical to SEQ ID NO: 9431

SEQ ID NO: 9587 - DNA, 201 bp, Homo sapiens; identical to SEQ ID NO: 9432

SEQ ID NO: 9588 - DNA, 201 bp, Homo sapiens; identical to SEQ ID NO: 9433

SEQ ID NO: 9589 - DNA, 201 bp, Homo sapiens; identical to SEQ ID NO: 9434

SEQ ID NO: 9590 - DNA, 201 bp, Homo sapiens; identical to SEQ ID NO: 9435

SEQ ID NO: 9591 - DNA, 201 bp, Homo sapiens; identical to SEQ ID NO: 9436

SEQ ID NO: 9592 - DNA, 201 bp, Homo sapiens; identical to SEQ ID NO: 9437

SEQ ID NO: 9593 - DNA, 201 bp, Homo sapiens; identical to SEQ ID NO: 9438

SEQ ID NO: 9594 - DNA, 201 bp, Homo sapiens; identical to SEQ ID NO: 9439

SEQ ID NO: 9595 - DNA, 201 bp, Homo sapiens; identical to SEQ ID NO: 9440

SEQ ID NO: 9596 - DNA, 201 bp, Homo sapiens; identical to SEQ ID NO: 9441

SEQ ID NO: 9597 - DNA, 201 bp, Homo sapiens; identical to SEQ ID NO: 9442

SEQ ID NO: 9598 - DNA, 201 bp, Homo sapiens; identical to SEQ ID NO: 9443

SEQ ID NO: 9599 - DNA, 201 bp, Homo sapiens; identical to SEQ ID NO: 9444

SEQ ID NO: 9600 - DNA, 201 bp, Homo sapiens; identical to SEQ ID NO: 9445

SEQ ID NO: 9601 - DNA, 201 bp, Homo sapiens; identical to SEQ ID NO: 9446

SEQ ID NO: 9602 - DNA, 201 bp, Homo sapiens; identical to SEQ ID NO: 9447

SEQ ID NO: 9603 - DNA, 101 bp, Homo sapiens; identical to SEQ ID NO: 9554

SEQ ID NO: 9604 - DNA, 201 bp, Homo sapiens; identical to SEQ ID NO: 9449

SEQ ID NO: 9605 - DNA, 201 bp, Homo sapiens; identical to SEQ ID NO: 9450

SEQ ID NO: 9606 - DNA, 201 bp, Homo sapiens; identical to SEQ ID NO: 9451

SEQ ID NO: 9607 - DNA, 201 bp, Homo sapiens; identical to SEQ ID NO: 9452

SEQ ID NO: 9608 - DNA, 201 bp, Homo sapiens; identical to SEQ ID NO: 9453

SEQ ID NO: 9609 - DNA, 201 bp, Homo sapiens; identical to SEQ ID NO: 9454

SEQ ID NO: 9610 - DNA, 201 bp, Homo sapiens; identical to SEQ ID NO: 9455

SEQ ID NO: 9611 - DNA, 201 bp, Homo sapiens; identical to SEQ ID NO: 9456

SEQ ID NO: 9612 - DNA, 201 bp, Homo sapiens; identical to SEQ ID NO: 9457

SEQ ID NO: 9613 - DNA, 201 bp, Homo sapiens; identical to SEQ ID NO: 9458

SEQ ID NO: 9614 - DNA, 201 bp, Homo sapiens; identical to SEQ ID NO: 9459

SEQ ID NO: 9615 - DNA, 201 bp, Homo sapiens; identical to SEQ ID NO: 9460

SEQ ID NO: 9616 - DNA, 201 bp, Homo sapiens; identical to SEQ ID NO: 9461

SEQ ID NO: 9617 - DNA, 201 bp, Homo sapiens; identical to SEQ ID NO: 9462

SEQ ID NO: 9618 - DNA, 201 bp, Homo sapiens; identical to SEQ ID NO: 9463

SEQ ID NO: 9619 - DNA, 201 bp, Homo sapiens; identical to SEQ ID NO: 9464

SEQ ID NO: 9620 - DNA, 201 bp, Homo sapiens; identical to SEQ ID NO: 9465

SEQ ID NO: 9621 - DNA, 201 bp, Homo sapiens; identical to SEQ ID NO: 9466

SEQ ID NO: 9622 - DNA, 201 bp, Homo sapiens; identical to SEQ ID NO: 9467

SEQ ID NO: 9623 - DNA, 201 bp, Homo sapiens; identical to SEQ ID NO: 9468

SEQ ID NO: 9624 - DNA, 201 bp, Homo sapiens; identical to SEQ ID NO: 9469

SEQ ID NO: 9625 - DNA, 201 bp, Homo sapiens; identical to SEQ ID NO: 9470

SEQ ID NO: 9626 - DNA, 201 bp, Homo sapiens; identical to SEQ ID NO: 9471

SEQ ID NO: 9627 - DNA, 201 bp, Homo sapiens; identical to SEQ ID NO: 9472

SEQ ID NO: 9628 - DNA, 201 bp, Homo sapiens; identical to SEQ ID NO: 9473

SEQ ID NO: 9629 - DNA, 201 bp, Homo sapiens; identical to SEQ ID NO: 9474

SEQ ID NO: 9630 - DNA, 201 bp, Homo sapiens; identical to SEQ ID NO: 9475

SEQ ID NO: 9631 - DNA, 201 bp, Homo sapiens; identical to SEQ ID NO: 9476

SEQ ID NO: 9632 - DNA, 201 bp, Homo sapiens; identical to SEQ ID NO: 9477

SEQ ID NO: 9633 - DNA, 201 bp, Homo sapiens; identical to SEQ ID NO: 9478

SEQ ID NO: 9634 - DNA, 201 bp, Homo sapiens; identical to SEQ ID NO: 9479

SEQ ID NO: 9635 - DNA, 201 bp, Homo sapiens; identical to SEQ ID NO: 9480

SEQ ID NO: 9636 - DNA, 201 bp, Homo sapiens; identical to SEQ ID NO: 9481

SEQ ID NO: 9637 - DNA, 201 bp, Homo sapiens; identical to SEQ ID NO: 9482

SEQ ID NO: 9638 - DNA, 201 bp, Homo sapiens; identical to SEQ ID NO: 9483

SEQ ID NO: 9639 - DNA, 201 bp, Homo sapiens; identical to SEQ ID NO: 9484

SEQ ID NO: 9640 - DNA, 201 bp, Homo sapiens; identical to SEQ ID NO: 9485

SEQ ID NO: 9641 - DNA, 201 bp, Homo sapiens; identical to SEQ ID NO: 9486

SEQ ID NO: 9642 - DNA, 201 bp, Homo sapiens; identical to SEQ ID NO: 9487

SEQ ID NO: 9643 - DNA, 201 bp, Homo sapiens; identical to SEQ ID NO: 9488

SEQ ID NO: 9644 - DNA, 201 bp, Homo sapiens; identical to SEQ ID NO: 9489

SEQ ID NO: 9645 - DNA, 201 bp, Homo sapiens; identical to SEQ ID NO: 9490

SEQ ID NO: 9646 - DNA, 201 bp, Homo sapiens; identical to SEQ ID NO: 9491

SEQ ID NO: 9647 - DNA, 201 bp, Homo sapiens; identical to SEQ ID NO: 9492

SEQ ID NO: 9648 - DNA, 201 bp, Homo sapiens; identical to SEQ ID NO: 9493

SEQ ID NO: 9649 - DNA, 201 bp, Homo sapiens; identical to SEQ ID NO: 9494

SEQ ID NO: 9650 - DNA, 201 bp, Homo sapiens; identical to SEQ ID NO: 9495

SEQ ID NO: 9651 - DNA, 201 bp, Homo sapiens; identical to SEQ ID NO: 9496

SEQ ID NO: 9652 - DNA, 201 bp, Homo sapiens; identical to SEQ ID NO: 9497

SEQ ID NO: 9653 - DNA, 201 bp, Homo sapiens; identical to SEQ ID NO: 9498

SEQ ID NO: 9654 - DNA, 201 bp, Homo sapiens; identical to SEQ ID NO: 9499

SEQ ID NO: 9655 - DNA, 201 bp, Homo sapiens; identical to SEQ ID NO: 9500

SEQ ID NO: 9656 - DNA, 201 bp, Homo sapiens; identical to SEQ ID NO: 9501

SEQ ID NO: 9657 - DNA, 201 bp, Homo sapiens; identical to SEQ ID NO: 9502

SEQ ID NO: 9658 - DNA, 201 bp, Homo sapiens; identical to SEQ ID NO: 9503

SEQ ID NO: 9659 - DNA, 201 bp, Homo sapiens; identical to SEQ ID NO: 9504

SEQ ID NO: 9660 - DNA, 201 bp, Homo sapiens; identical to SEQ ID NO: 9505

SEQ ID NO: 9661 - DNA, 201 bp, Homo sapiens; identical to SEQ ID NO: 9506

SEQ ID NO: 9662 - DNA, 201 bp, Homo sapiens; identical to SEQ ID NO: 9507

SEQ ID NO: 9663 - DNA, 201 bp, Homo sapiens; identical to SEQ ID NO: 9508

SEQ ID NO: 9664 - DNA, 201 bp, Homo sapiens; identical to SEQ ID NO: 9509

SEQ ID NO: 9665 - DNA, 201 bp, Homo sapiens; identical to SEQ ID NO: 9510

SEQ ID NO: 9666 - DNA, 201 bp, Homo sapiens; identical to SEQ ID NO: 9511

SEQ ID NO: 9667 - DNA, 201 bp, Homo sapiens; identical to SEQ ID NO: 9512

SEQ ID NO: 9668 - DNA, 201 bp, Homo sapiens; identical to SEQ ID NO: 9513

SEQ ID NO: 9669 - DNA, 201 bp, Homo sapiens
ttgcagagctccagggcttcgcggtggacaaggccttcctcacctcccacaagggcatcctgctggaaaccgagctggccctgaccctcatcatcttcatytgcttcacggcctccatctctgcctacatggccgcggcgctactggagttcttcatcacacttgccttcctcttcctctatgccacccagtactaccagc

SEQ ID NO: 9670 - DNA, 201 bp, Homo sapiens
gcttcgaccgaattaactggccctgtctggacttcctgcgctgtgtcagtgccatcatcatcttcctggtggtctcctttgcagctgtgacctcccgggayggagctgccattgctgcttttgtttttggcatcatcctggtttccatctttgcctatgatgccttcaagatctaccggactgagatggcacccggggcca

SEQ ID NO: 9671 - DNA, 201 bp, Homo sapiens
tcctctctgcccctccccatgggtctctagggggctggtgcaggcagcagcagaggcactctgggcagctgggtgagggcccatctgggcaaggcccccakcgcctgccttctctcccggggccctgtgggcaagcctcctgcttcactttcaggtttctcgaagtgccttcttgctcctgtctgtttccccatcctgcca

SEQ ID NO: 9672 - DNA, 201 bp, Homo sapiens
gagtttcttctggaggatgtcacagagaattccatcctgcagtgcttcttctcttgtgcagggattcaaaaggacacaagccttggcatcactgtgtattygccaccagagcaagtgatcctggagctgcagcctgcctgggtggctgtggacgaagccttcacagtgaagtgtcatgtacccagtgtagcacccttggag

SEQ ID NO: 9673 - DNA, 201 bp, Homo sapiens
cttctcttgtgcagggattcaaaaggacacaagccttggcatcactgtgtattagccaccagagcaagtgatcctggagctgcagcctgcctgggtggctytggacgaagccttcacagtgaagtgtcatgtacccagtgtagcacccttggagagtctcacccttgcccttctccagggtaaccaagaactgcatagaaa

SEQ ID NO: 9674 - DNA, 201 bp, Homo sapiens
tatatatatttttggtcactttctccagcattgctgtctttttctctccagcctttggcccttcttatcaggatgaaaacgcttctgtttggtgtctggarcctgctggccttgatcctttgcccaggggtcccggaagagttgtttgaggtttctatttggccaagtcaggccctggtggagtttggacagtccctagtg

SEQ ID NO: 9675 - DNA, 201 bp, Homo sapiens
ggaggaaattgctctataggcagaaagaggaggacaaagaggaggaaagccagtttgctgttcaggaagagaaaagtacaactcatataattgacaactgrttgattgaatgagacttctgctactgtggtttcccagggagggaagaagggatagaggagaaaggaagaaacacaatggcaggctgcattcccctttgtg

SEQ ID NO: 9676 - DNA, 201 bp, Homo sapiens
actcttcggcttcagggagccccagacctccctgctggggagcctgcctggcttctacttactgccagggaggaagatgatggctgaaatttctcctgcgkggcctctttggtggtgcagggtcagcggttgatgaaaaccactgtgatccagctccatatcctatgcaagccacagttagaggaatccagttgccctggc

SEQ ID NO: 9677 - DNA, 201 bp, Homo sapiens
agccacagttagaggaatccagttgccctggcaaacagacctggctggaagggatggaacacacgctcgcctgcgtcccaaagggaaacccagctccagcyttggtgtgtacctggaatggggtggtctttgaccttgaagtgccacagaaggcaacctagaaccacactggaacctaccgctacacagccactaaccagc

SEQ ID NO: 9678 - DNA, 201 bp, Homo sapiens
tttgctgggtatgctctcaagtgaacatgagtcttcatctttctctggcttccctccaccaatcctggagctaaaagaatcatacccattggcagggaccyacattaatgtgacctgctcagggcatgtattaacatcacccagccctactcttcggcttcagggagccccagacctccctgctggggagcctgcctggct

SEQ ID NO: 9679 - DNA, 201 bp, Homo sapiens
gttgatgaaaaccactgtgatccagctccatatcctatgcaagccacagttagaggaatccagttgccctggcaaacagacctggctggaagggatggaaaacacgctcgcctgcgtcccaaagggaaacccagctccagccttggtgtgtacctggaatggggtggtctttgaccttgaagtgccacagaaggcaaccta

SEQ ID NO: 9680 - DNA, 201 bp, Homo sapiens
acaggaggaaattgctctataggcagaaagaggaggacaaagaggaggaaagccagtttgctgttcaggaagagaaaagtacaactcatataattgacaartgtttgattgaatgagacttctgctactgtggtttcccagggagggaagaagggatagaggagaaaggaagaaacacaatggcaggctgcattccccttt

SEQ ID NO: 9681 - DNA, 201 bp, Homo sapiens
aaaagatgaggcgagcaaaactagccaaggagaaggcagagaaggagcggctagagaagcagcagaagagagagcaactcatagacatgaatgcagagggygatgagacaggtgtgatggacagtcttctagaagccctgcagtcaggggcagcattccgacggaagagagggccccgtcaagacaacctcttgtgcccct

SEQ ID NO: 9682 - DNA, 201 bp, Homo sapiens
tatcccgatgtcctcaagtttccagacgagcttgcccatgtggagaaagccagccgagtttctgctgaaaacttgcaaaagaacctagatcagatgaagamacaaatttctgatgtggaacgtgatgttcagaatttcccagctgccacagatgaaaaagacaagtttgttgaaaaaatgaccagctttgtgaaggatgca

SEQ ID NO: 9683 - DNA, 201 bp, Homo sapiens
cccacctcctcccttgcctggagaagcaggaatgccacctcctcctccccctcttcctggtggtcctggaatccctccacctcctccatttcccggaggcmctggcattcctccacctccacccggaatgggtatgcctccacctcccccatttggatttggagttcctgcagccccagttctgccatttggattaacccc

SEQ ID NO: 9684 - DNA, 201 bp, Homo sapiens
aagaaaactgttccttccccctttcccctccataatgtaagaagctttggtggcaggttacagagttctgggatttcttctcacaggcccaatcctgaatrtgcccctggaccttctggacccttgagtccaaggcagatcctctctcccagggaatccgacacaggaggaaccccttctctggttgagctgggccaggcc

SEQ ID NO: 9685 - DNA, 201 bp, Homo sapiens
ccttctgttcctagtcgtgctcctgttccccctgcccctcctttacctggtgactctggcactattattccaccaccacctgctcctggggatagtaccaytcctcctcctcctcctcctcctcctcctcctccacctcctttgcctgggggtgtttgcatctcctcacccccttctttacctggaggtactgctatctct

SEQ ID NO: 9686 - DNA, 201 bp, Homo sapiens
tctccaccccctcctttgtctggggatgctaccatccctccaccccctcctttgcctgagggtgttggcatcccttcaccctcttctttgcctggaggtastgccatccccccacctcctcctttgcctgggagtgctagaatccccccaccaccacctcctttgcctgggagtgctggaattccccccccacctcctccc

SEQ ID NO: 9687 - DNA, 201 bp, Homo sapiens
acaggaaggccgggtgtgcagtcacatctctgctagcttcggagctgaccaaggatgatgccatggctgctgttcctgccaaggtgtccaagaacagtgaracattccccacaatccttgaggaagccaaggagttggttggccgtgcaagctaatgtgggtcctgtgaccgcggcagctcctcagcggagccgcagactg

SEQ ID NO: 9688 - DNA, 201 bp, Homo sapiens
aacagatgctgctggatatgaacctgaatgaggagaaacagcaacctttgagggagaaggacatcatcatcaagagggagatggtgtcccaatacttgtayacctccaaggctggcatgagccagaaggagagctctaagtctgccatgatgtatattcaggagttgaggtcaggcttgcgggatatgcctctgctcagct

SEQ ID NO: 9689 - DNA, 201 bp, Homo sapiens
cccggaatgggtatgcctccacctcccccatttggatttggagttcctgcagccccagttctgccatttggattaacccccaaaaagctttataagccagwggtgcagctccggaggccaaactggtccaagcttgtggctgaggacctctcccaggactgcttctggacaaaggtgaaggaggaccgctttgagaacaat

SEQ ID NO: 9690 - DNA, 201 bp, Homo sapiens
ccggaatgggtatgcctccacctcccccatttggatttggagttcctgcagccccagttctgccatttggattaacccccaaaaagctttataagccagargtgcagctccggaggccaaactggtccaagcttgtggctgaggacctctcccaggactgcttctggacaaaggtgaaggaggaccgctttgagaacaatg

SEQ ID NO: 9691 - DNA, 201 bp, Homo sapiens
aaaagatgaggcgagcaaaactagccaaggagaaggcagagaaggagcggctagagaagcagcagaagagagagcaactcatagacatgaatgcagagggygatgagacaggtgtgatggacagtcttctagaagccctgcagtcaggggcagcattccgacggaagagagggccccgtcaagccaacaggaaggccgggt

SEQ ID NO: 9692 - DNA, 201 bp, Homo sapiens
tatcccgatgtcctcaagtttccagacgagcttgcccatgtggagaaagccagccgagtttctgctgaaaacttgcaaaagaacctagatcagatgaagamacaaatttctgatgtggaacgtgatgttcagaatttcccagctgccacagatgaaaaagacaagtttgttgaaaaaatgaccatctttgtgaaggatgca

SEQ ID NO: 9693 - DNA, 201 bp, Homo sapiens; identical to SEQ ID NO: 9683

SEQ ID NO: 9694 - DNA, 201 bp, Homo sapiens; identical to SEQ ID NO: 9684

SEQ ID NO: 9695 - DNA, 201 bp, Homo sapiens
ccttctgttcctagtcgtgctcctgttccccctgcccctcctttacctggtgactctggcactattattccaccaccacctgctcctggggatagtaccaytcctcctcctcctcctcctcctcctcctcctccacctcctttgcctggaggtactgctatctctccaccccctcctttgtctggggatgctaccatccct

SEQ ID NO: 9696 - DNA, 201 bp, Homo sapiens; identical to SEQ ID NO: 9686

SEQ ID NO: 9697 - DNA, 201 bp, Homo sapiens; identical to SEQ ID NO: 9687

SEQ ID NO: 9698 - DNA, 201 bp, Homo sapiens; identical to SEQ ID NO: 9688

SEQ ID NO: 9699 - DNA, 201 bp, Homo sapiens; identical to SEQ ID NO: 9689

SEQ ID NO: 9700 - DNA, 201 bp, Homo sapiens; identical to SEQ ID NO: 9690

SEQ ID NO: 9701 - DNA, 174 bp, Homo sapiens
aagccaacaggccccccagccaagaaagctatctctgagttgccctgatttgaagggaaaagggatgatgggattgaaggggcttctaatgacccagatayggaaacagaagacaaaattgtaagccagagtcaacaaattaaataaattaccccctcctccagatcaagtcag

SEQ ID NO: 9702 - DNA, 200 bp, Homo sapiens
aggggaaaggggaagtttgggaggaaggcttctgagaagactggtgggagagaaggagagcctgcagacagaggcctccagcttggaggaaaagctttcrgactgctgaaggcccagcaggaagagaggctggatgagatcaacaagcaattcctagacgatcccaaatatagcagtgatgaggatctgccctccaaact

SEQ ID NO: 9703 - DNA, 201 bp, Homo sapiens
ttgtggtagcaaaaggggaacctgcctttattgccctcctgccacactgcggtccctttcccgggcctgcctctctcagcatcccctctagctccttacamcctagcggggcccctcaactccccaaccccacttcctctgcctgcccctcctcctccttccacgttgtctcctccacctagcagttggttggcaacccct

SEQ ID NO: 9704 - DNA, 201 bp, Homo sapiens
gaaaaccctccagtcagcgcttatcccttctgctctctcccctcacccagagaaatacatggagtttgaccttaatggaaatggcgatattggtgagaaaygggtgatttgcgggggcagggtggtgtgcaggcctaagaagacagaggtctctcctacatgctccattcctcatgatttgggagggggcccacctaccac

SEQ ID NO: 9705 - DNA, 201 bp, Homo sapiens
cctcaactccccaaccccacttcctctgcctgcccctcctcctccttccacgttgtctcctccacctagcagttggttggcaaccccttcctcagtcccckgctgaaaaccctccagtcagcgcttatcccttctgctctctcccctcacccagagaaatacatggagtttgaccttaatggaaatggcgatattggtgag

SEQ ID NO: 9706 - DNA, 201 bp, Homo sapiens
tccattcctcatgatttgggagggggcccacctaccacagtgggaggaaggagaatggggatgcggaagtgggagaggagagagagggtctccccaccttytccccatccccatcctctgcccccagatatcatgtccctgaaacgaatgctggagaaacttggagtccccaagactcacctagagctaaagaaattaatt

SEQ ID NO: 9707 - DNA, 201 bp, Homo sapiens
ccccacttcctctgcctgcccctcctcctccttccacgttgtctcctccacctagcagttggttggcaaccccttcctcagtcccctgctgaaaaccctcsagtcagcgcttatcccttctgctctctcccctcacccagagaaatacatggagtttgaccttaatggaaatggcgatattggtgagaaacgggtgatttg

SEQ ID NO: 9708 - DNA, 174 bp, Homo sapiens; identical to SEQ ID NO: 9701

SEQ ID NO: 9709 - DNA, 201 bp, Homo sapiens
cctgcagacagaggcctccagcttggtctgtctccccacctctaccagcatctgctgagctatgagccaaaccagggatttacagggaggaaaagctttcrgactgctgaaggcccagcaggaagagaggctggatgagatcaacaagcaattcctagacgatcccaaatatagcagtgatgaggatctgccctccaaact

SEQ ID NO: 9710 - DNA, 174 bp, Homo sapiens; identical to SEQ ID NO: 9701

SEQ ID NO: 9711 - DNA, 200 bp, Homo sapiens; identical to SEQ ID NO: 9702

SEQ ID NO: 9712 - DNA, 201 bp, Homo sapiens; identical to SEQ ID NO: 9703

SEQ ID NO: 9713 - DNA, 201 bp, Homo sapiens
cctcaactccccaaccccacttcctctgcctgcccctcctcctccttccacgttgtctcctccacctagcagttggttggcaaccccttcctcagtcccckgctgaaaaccctccagtcagcgcttatcccttctgctctctcccctcacccagagaaatacatggagtttgaccttaatggaaatggcgatattgatatc

SEQ ID NO: 9714 - DNA, 201 bp, Homo sapiens
ccccacttcctctgcctgcccctcctcctccttccacgttgtctcctccacctagcagttggttggcaaccccttcctcagtcccctgctgaaaaccctcsagtcagcgcttatcccttctgctctctcccctcacccagagaaatacatggagtttgaccttaatggaaatggcgatattgatatcatgtccctgaaacg

SEQ ID NO: 9715 - DNA, 174 bp, Homo sapiens; identical to SEQ ID NO: 9701

SEQ ID NO: 9716 - DNA, 169 bp, Homo sapiens
aagccaacaggccccccagccaagaaagctatctctgagttgccctgatttgaagggaaaagggatgatgggattgaaggggcttctaatgacccagatayggaaacagaagacaaaattgtaagccagagtcaacaaattaaataaattaccccctcctccagatcaa

SEQ ID NO: 9717 - DNA, 115 bp, Homo sapiens
gaggaaaagctttcrgactgctgaaggcccagcaggaagagaggctggatgagatcaacaagcaattcctagacgatcccaaatatagcagtgatgaggatctgccctccaaact

SEQ ID NO: 9718 - DNA, 201 bp, Homo sapiens
tgtctcctccacctagcagttggttggcaaccccttcctcagtcccccagagaaatacatggagtttgaccttaatggaaatggcgatattggtgagaaaygggtgatttgcgggggcagggtggtgtgcaggcctaagaagacagaggtctctcctacatgctccattcctcatgatttgggagggggcccacctaccac

SEQ ID NO: 9719 - DNA, 201 bp, Homo sapiens; identical to SEQ ID NO: 9703

SEQ ID NO: 9720 - DNA, 201 bp, Homo sapiens; identical to SEQ ID NO: 9706

SEQ ID NO: 9721 - DNA, 200 bp, Homo sapiens; identical to SEQ ID NO: 9702

SEQ ID NO: 9722 - DNA, 201 bp, Homo sapiens; identical to SEQ ID NO: 9703

SEQ ID NO: 9723 - DNA, 201 bp, Homo sapiens; identical to SEQ ID NO: 9704

SEQ ID NO: 9724 - DNA, 201 bp, Homo sapiens; identical to SEQ ID NO: 9705

SEQ ID NO: 9725 - DNA, 201 bp, Homo sapiens; identical to SEQ ID NO: 9706

SEQ ID NO: 9726 - DNA, 201 bp, Homo sapiens; identical to SEQ ID NO: 9707

SEQ ID NO: 9727 - DNA, 201 bp, Homo sapiens
cctgcagacagaggcctccagcttggtctgtctccccacctctaccagcatctgctgagctatgagccaaaccagggatttacagggaggaaaagctttcrgactgctgaaggcccagcaggaagagaggctggatgagatcaacaaggtagaaggaagaactaagggggcagagccagggggatggggcgtggatgggga

SEQ ID NO: 9728 - DNA, 201 bp, Homo sapiens; identical to SEQ ID NO: 9703

SEQ ID NO: 9729 - DNA, 201 bp, Homo sapiens; identical to SEQ ID NO: 9704

SEQ ID NO: 9730 - DNA, 201 bp, Homo sapiens; identical to SEQ ID NO: 9705

SEQ ID NO: 9731 - DNA, 201 bp, Homo sapiens; identical to SEQ ID NO: 9706

SEQ ID NO: 9732 - DNA, 201 bp, Homo sapiens; identical to SEQ ID NO: 9707

SEQ ID NO: 9733 - DNA, 201 bp, Homo sapiens
agttggcaacttttgaccctgtggacaacattgtcttcaatatggctgctggctctgccccgatgcagctccaccttcgtgctaccatccgcatgaaagaygggctctgtgtgccccggaaatggatctaccacctgactgaagggagcacagatctcagaactgaaggccgccctgacatgaagactgagctcttttcca

SEQ ID NO: 9734 - DNA, 201 bp, Homo sapiens
aacttttgaccctgtggacaacattgtcttcaatatggctgctggctctgccccgatgcagctccaccttcgtgctaccatccgcatgtgagtggaaagaygggctctgtgtgccccggaaatggatctaccacctgactgaagggagcacagatctcagaactgaaggccgccctgacatgaagactgagctcttttcca

SEQ ID NO: 9735 - DNA, 201 bp, Homo sapiens; identical to SEQ ID NO: 9733

SEQ ID NO: 9736 - DNA, 201 bp, Homo sapiens; identical to SEQ ID NO: 9734

SEQ ID NO: 9737 - DNA, 201 bp, Homo sapiens
tgctgtcagtacgattattgcaactcctggtcaagcccccaactccagagctctctgccggagccccatgacaggcccctggccctgcctctgtctgactmccagattcagtggttctaccaggccctgaacctctccctgcccctccccaatttccatgctgggacggagcctgatggcctggaccccatggtcacactg

SEQ ID NO: 9738 - DNA, 201 bp, Homo sapiens
taggcctccgtctgttgtaccactagcatctatatgacttttgtgtaattttctctcttgaactctggtgctgtttttttgtttgtttgagacaaagtctygctctgtcacccagggtggagtgcagtggcatgatctctgctcactacaacctccacctcccgggttccagcgattctcctgcctcagcctcccgagtag

SEQ ID NO: 9739 - DNA, 201 bp, Homo sapiens
acggggtttcaccatgttggtcaggctggtctcgaactcctgacctcgtaatctgccctcctcgacctcccaaagtgccgggattacaggtgtgagccacygtgcctgtctgagctctggtgctgttcttccccctagaaaagaatctctagtgtggattctgcccagacaggctgacctgagaaaggcacagtggttcct

SEQ ID NO: 9740 - DNA, 201 bp, Homo sapiens
tcaccatgttggtcaggctggtctcgaactcctgacctcgtaatctgccctcctcgacctcccaaagtgccgggattacaggtgtgagccactgtgcctgkctgagctctggtgctgttcttccccctagaaaagaatctctagtgtggattctgcccagacaggctgacctgagaaaggcacagtggttcctccattcct

SEQ ID NO: 9741 - DNA, 130 bp, Homo sapiens
aatcccagcactttgggaggccgaggtgggcggatcacttgagattgggagtttgagaccagcctggccaacatggtaaaacccgctctctattaaaaatwgaaaaatcagctgggtgtggtggcacacc

SEQ ID NO: 9742 - DNA, 201 bp, Homo sapiens
catcgttcgaggctgtggacagtacatttcctaccgctgccaagaaaaacgcaacacctactttgcagagtactggtatcaggcccagtgctgtcagtacrattattgcaactcctggtcaagcccccaactccagagctctctgccggagccccatgacaggcccctggccctgcctctgtctgactcccagattcagtg

SEQ ID NO: 9743 - DNA, 201 bp, Homo sapiens
tcccctgtcttgtccatgtctctaagacccagtaccagactgaactagcagcaagaaggacgaggaggccgggcatggtggctcacgccggtaatcccagmactttgggaggccgaggtgggcggatcacttgagattgggagtttgagaccagcctggccaacatggtaaaacccgctctctattaaaaatagaaaaatc

SEQ ID NO: 9744 - DNA, 201 bp, Homo sapiens
ctccctgcccctccccaatttccatgctgggacggagcctgatggcctggaccccatggtcacactgtccctgaacctgggcttgtcttttgctgagctgygccgcatgtacttgttcctcaatagttcaggacttttggttcttccccaggctggactcttgacacctcacccttcctgaattccacagtgcaaatatct

SEQ ID NO: 9745 - DNA, 201 bp, Homo sapiens
agccccatgacaggcccctggccctgcctctgtctgactcccagattcagtggttctaccaggccctgaacctctccctgcccctccccaatttccatgcygggacggagcctgatggcctggaccccatggtcacactgtccctgaacctgggcttgtcttttgctgagctgcgccgcatgtacttgttcctcaatagtt

SEQ ID NO: 9746 - DNA, 201 bp, Homo sapiens
atgtcaaggttcgcttcatcgttcgaggctgtggacagtacatttcctaccgctgccaagaaaaacgcaacacctactttgcagagtactggtatcaggcycagtgctgtcagtacgattattgcaactcctggtcaagcccccaactccagagctctctgccggagccccatgacaggcccctggccctgcctctgtctg

SEQ ID NO: 9747 - DNA, 123 bp, Homo sapiens
ggaaaagtagcctaaagtcagtmtaactaaagggtggaacgaggtgggacaaggtccggaattgctgctcagtgatgtgtgtgtgcctgccgctggtggagctgagactgctcatctcagaag

SEQ ID NO: 9748 - DNA, 201 bp, Homo sapiens
ccccatgacaggcccctggccctgcctctgtctgactcccagattcagtggttctaccaggccctgaacctctccctgcccctccccaatttccatgctgsgacggagcctgatggcctggaccccatggtcacactgtccctgaacctgggcttgtcttttgctgagctgcgccgcatgtacttgttcctcaatagttca

SEQ ID NO: 9749 - DNA, 201 bp, Homo sapiens; identical to SEQ ID NO: 9737

SEQ ID NO: 9750 - DNA, 170 bp, Homo sapiens
taggcctccgtctgttgtaccactagcatctatatgacttttgtgtaattttctctcttgaactctggtgctgtttttttgtttgtttgagacaaagtctygcttgcactccagcctgggtgacacagtgagactccgtctccaaaaaaaaggatgaggaatagaattct

SEQ ID NO: 9751 - DNA, 201 bp, Homo sapiens; identical to SEQ ID NO: 9742

SEQ ID NO: 9752 - DNA, 201 bp, Homo sapiens; identical to SEQ ID NO: 9744

SEQ ID NO: 9753 - DNA, 201 bp, Homo sapiens; identical to SEQ ID NO: 9745

SEQ ID NO: 9754 - DNA, 201 bp, Homo sapiens; identical to SEQ ID NO: 9746

SEQ ID NO: 9755 - DNA, 123 bp, Homo sapiens; identical to SEQ ID NO: 9747

SEQ ID NO: 9756 - DNA, 201 bp, Homo sapiens; identical to SEQ ID NO: 9748

SEQ ID NO: 9757 - DNA, 201 bp, Homo sapiens
tggcagggatgcggctcagctcgctgaagaagctggcttccctgaggtagcccgcatggtcagggagagccatggagagacaaggagcccggaaaaccggkctcctactccctccctccagtactgcgagaactgtgacacccacttccaagattccaaccaccgcacatccactgctcacctgctgtcactgtcgcaggg

SEQ ID NO: 9758 - DNA, 201 bp, Homo sapiens
cctccgggctcctgcctcatgaggggagaggtgcggcttggctccgtgcgtagggacttgggtggggtggggtgggcggtgtgagaactggaacgtcccaktgcgctaacctgaggtggtgccagccattctgctcgtccctttgcacttctccatttccccttaggctctaagtgtgaccttcgaaccctggtcagagta

SEQ ID NO: 9759 - DNA, 201 bp, Homo sapiens
cgggcttcaaactgctgctgagggggggctgggagccaggaatggggctgggaccccggggtgagggccgtgccaatcccatccccactgtcctcaagagrgaccaggaaggactaggctacagatcagcaccccagccccgagtgacacatttcccagcttgggatacccgagctgtggctgggagggagagaccccctc

SEQ ID NO: 9760 - DNA, 201 bp, Homo sapiens
tcgagttctgactttggtaaagtctgaccctagtctgctgctgaagtctgaacttgggcctctgacctgggccctttgacttccccttcctgggatctgcycagatgcagatcctgaagtttttggtcaataggctctgtcttcgtgagagacgggctgagagtcagaaataaatcaaccatttgtggtttattcactttt

SEQ ID NO: 9761 - DNA, 201 bp, Homo sapiens
gtgctcactgggtgaagaggctgacttagggcggggaaaggagggagccaggctggatctctttccgcagctctcctcacgttcccctctagtcccggcgmggcgctgctgcccaggggactggcctatcctcggccaatccgctgggtccttattgcctgttgggcccctagtgcgaatcagtcccgccagagacccttg

SEQ ID NO: 9762 - DNA, 201 bp, Homo sapiens
accttcaccccagccactgaccccagcgacctctggaaggatgggcagcagcagccacagcccgagaagccagagtccaccctggatggggctgcagccckagctttctatgaggccctgattggggatgagagcagcgctcctgactcccagagatctcagactgaacctgccagagaaagaaagagaaagaaaagaaga

SEQ ID NO: 9763 - DNA, 201 bp, Homo sapiens
ccagcagcagaagcagtggcagaaggagcatcaggaagacatggacaagggagatcccttgaggctgaggataagatgactcaccggatactgagggcagyccaggagggggacctgccagaacttaggagactgctggaaccgcatgaggcaggaggagctggggggaatatcaacgcccgggatgccttctggtggacc

SEQ ID NO: 9764 - DNA, 201 bp, Homo sapiens
cacagcaacacgtataggagactctccccgagatcttctagggagtgacccatctatttttgtttgggaagaggaaactccgaaatgggatcgcggaagamttaaagggccaggctgatttttttttcctactggtctctgaggctgtggttgctacagggtcaccacgagcttggcttacttgtctcatccttcccttgc

SEQ ID NO: 9765 - DNA, 201 bp, Homo sapiens
agcagcagccacagcccgagaagccagagtccaccctggatggggctgcagcccgagctttctatgaggccctgattggggatgagagcagcgctcctgastcccagagatctcagactgaacctgccagagaaagaaagagaaagaaaagaagaataatgaaggcaccagcagcagaagcagtggcagaaggagcatcag

SEQ ID NO: 9766 - DNA, 201 bp, Homo sapiens
gtgccaatcccatccccactgtcctcaagagggaccaggaaggactaggctacagatcagcaccccagccccgagtgacacatttcccagcttgggatacmcgagctgtggctgggagggagagaccccctcgggtggccacactgagctggagggaggagagaaggagggaggagaaagacagggcttgggagcgggatc

SEQ ID NO: 9767 - DNA, 201 bp, Homo sapiens
agtggcagaaggagcatcaggaagacatggacaagggagatcccttgaggctgaggataagatgactcaccggatactgagggcagcccaggagggggacytgccagaacttaggagactgctggaaccgcatgaggcaggaggagctggggggaatatcaacgcccgggatgccttctggtggaccccactgatgtgtgc

SEQ ID NO: 9768 - DNA, 160 bp, Homo sapiens
gggcaatacagttttgtgctcactgggtgaagaggctgacttagggcggggaaaggaggragccaggctggatctctttccgcagctctcctcacgttcccctctagtcccggcgcggcgctgctgcccaggggactggcctatcctcggccaatccgct

SEQ ID NO: 9769 - DNA, 201 bp, Homo sapiens
aagacagggcttgggagcgggatctaaggacttacatgaacctcgagttctgactttggtaaagtctgaccctagtctgctgctgaagtctgaacttgggyctctgacctgggccctttgacttccccttcctgggatctgctcagatgcagatcctgaagtttttggtcaataggctctgtcttcgtgagagacgggctg

SEQ ID NO: 9770 - DNA, 201 bp, Homo sapiens
actgaacccggagctttgcgcacgcccgagccctcaagtaatgtgggttgtggtttttgttgttgttgtcgccacgcatgcgtcttcgtgccgtgtggctwtttgattgtgtcaactcttctgattagaatggcgccattttgcggtacggaagctacacagcaacacgtataggagactctccccgagatcttctaggga

SEQ ID NO: 9771 - DNA, 201 bp, Homo sapiens
ggtggggtggggtgggcggtgtgagaactggaacgtcccagtgcgctaacctgaggtggtgccagccattctgctcgtccctttgcacttctccatttccycttaggctctaagtgtgaccttcgaaccctggtcagagtaatggtgaggggcaggcgtgacgttatttcattacacggcttctcggcattccacaggttt

SEQ ID NO: 9772 - DNA, 201 bp, Homo sapiens
gagacaaggagcccggaaaaccggtctcctactccctccctccagtactgcgagaactgtgacacccacttccaagattccaaccaccgcacatccactgytcacctgctgtcactgtcgcagggtcctcagcctcccaaccttccacttggggtgcccatctccagcccgggcttcaaactgctgctgagggggggctgg

SEQ ID NO: 9773 - DNA, 201 bp, Homo sapiens
gattagaatggcgccattttgcggtacggaagctacacagcaacacgtataggagactctccccgagatcttctagggagtgacccatctatttttgtttrggaagaggaaactccgaaatgggatcgcggaagacttaaagggccaggctgatttttttttcctactggtctctgaggctgtggttgctacagggtcacc

SEQ ID NO: 9774 - DNA, 201 bp, Homo sapiens
gtggtgccagccattctgctcgtccctttgcacttctccatttccccttaggctctaagtgtgaccttcgaaccctggtcagagtaatggtgaggggcagkcgtgacgttatttcattacacggcttctcggcattccacaggtttccctccgcctcctgagggcctttcctaacccacagagtggattcctggctccaga

SEQ ID NO: 9775 - DNA, 201 bp, Homo sapiens; identical to SEQ ID NO: 9765

SEQ ID NO: 9776 - DNA, 201 bp, Homo sapiens; identical to SEQ ID NO: 9766

SEQ ID NO: 9777 - DNA, 201 bp, Homo sapiens; identical to SEQ ID NO: 9767

SEQ ID NO: 9778 - DNA, 201 bp, Homo sapiens; identical to SEQ ID NO: 9757

SEQ ID NO: 9779 - DNA, 173 bp, Homo sapiens
ggcccgggagtctgggcaatacagttttgtgctcactgggtgaagaggctgacttagggcggggaaaggaggragccaggctggatctctttccgcagctctcctcacgttcccctctagtcccggcgcggcgctgctgcccaggggactggcctatcctcggccaatccgct

SEQ ID NO: 9780 - DNA, 201 bp, Homo sapiens; identical to SEQ ID NO: 9759

SEQ ID NO: 9781 - DNA, 201 bp, Homo sapiens; identical to SEQ ID NO: 9760

SEQ ID NO: 9782 - DNA, 201 bp, Homo sapiens; identical to SEQ ID NO: 9769

SEQ ID NO: 9783 - DNA, 201 bp, Homo sapiens; identical to SEQ ID NO: 9761

SEQ ID NO: 9784 - DNA, 201 bp, Homo sapiens; identical to SEQ ID NO: 9772

SEQ ID NO: 9785 - DNA, 201 bp, Homo sapiens; identical to SEQ ID NO: 9762

SEQ ID NO: 9786 - DNA, 201 bp, Homo sapiens
ggagagaatggcgccattttgcggtacggaagctacacagcaacacgtataggagactctccccgagatcttctagggagtgacccatctatttttgtttrggaagaggaaactccgaaatgggatcgcggaagacttaaagggccaggctgatttttttttcctactgcaggtctctgaggctgtggttgctacagggtc

SEQ ID NO: 9787 - DNA, 201 bp, Homo sapiens; identical to SEQ ID NO: 9763

SEQ ID NO: 9788 - DNA, 201 bp, Homo sapiens
cacagcaacacgtataggagactctccccgagatcttctagggagtgacccatctatttttgtttgggaagaggaaactccgaaatgggatcgcggaagamttaaagggccaggctgatttttttttcctactgcaggtctctgaggctgtggttgctacagggtcaccacgagcttggcttacttgtctcatccttccct

SEQ ID NO: 9789 - DNA, 201 bp, Homo sapiens; identical to SEQ ID NO: 9757

SEQ ID NO: 9790 - DNA, 201 bp, Homo sapiens; identical to SEQ ID NO: 9758

SEQ ID NO: 9791 - DNA, 201 bp, Homo sapiens; identical to SEQ ID NO: 9759

SEQ ID NO: 9792 - DNA, 201 bp, Homo sapiens; identical to SEQ ID NO: 9760

SEQ ID NO: 9793 - DNA, 201 bp, Homo sapiens; identical to SEQ ID NO: 9761

SEQ ID NO: 9794 - DNA, 201 bp, Homo sapiens; identical to SEQ ID NO: 9762

SEQ ID NO: 9795 - DNA, 201 bp, Homo sapiens; identical to SEQ ID NO: 9763

SEQ ID NO: 9796 - DNA, 201 bp, Homo sapiens; identical to SEQ ID NO: 9788

SEQ ID NO: 9797 - DNA, 201 bp, Homo sapiens; identical to SEQ ID NO: 9765

SEQ ID NO: 9798 - DNA, 201 bp, Homo sapiens; identical to SEQ ID NO: 9766

SEQ ID NO: 9799 - DNA, 201 bp, Homo sapiens; identical to SEQ ID NO: 9767

SEQ ID NO: 9800 - DNA, 160 bp, Homo sapiens; identical to SEQ ID NO: 9768

SEQ ID NO: 9801 - DNA, 201 bp, Homo sapiens; identical to SEQ ID NO: 9769

SEQ ID NO: 9802 - DNA, 201 bp, Homo sapiens; identical to SEQ ID NO: 9770

SEQ ID NO: 9803 - DNA, 201 bp, Homo sapiens; identical to SEQ ID NO: 9771

SEQ ID NO: 9804 - DNA, 201 bp, Homo sapiens; identical to SEQ ID NO: 9772

SEQ ID NO: 9805 - DNA, 201 bp, Homo sapiens
gattagaatggcgccattttgcggtacggaagctacacagcaacacgtataggagactctccccgagatcttctagggagtgacccatctatttttgtttrggaagaggaaactccgaaatgggatcgcggaagacttaaagggccaggctgatttttttttcctactgcaggtctctgaggctgtggttgctacagggtc

SEQ ID NO: 9806 - DNA, 201 bp, Homo sapiens; identical to SEQ ID NO: 9774

SEQ ID NO: 9807 - DNA, 201 bp, Homo sapiens; identical to SEQ ID NO: 9765

SEQ ID NO: 9808 - DNA, 201 bp, Homo sapiens; identical to SEQ ID NO: 9766

SEQ ID NO: 9809 - DNA, 201 bp, Homo sapiens; identical to SEQ ID NO: 9767

SEQ ID NO: 9810 - DNA, 201 bp, Homo sapiens; identical to SEQ ID NO: 9757

SEQ ID NO: 9811 - DNA, 173 bp, Homo sapiens; identical to SEQ ID NO: 9779

SEQ ID NO: 9812 - DNA, 201 bp, Homo sapiens; identical to SEQ ID NO: 9759

SEQ ID NO: 9813 - DNA, 201 bp, Homo sapiens; identical to SEQ ID NO: 9760

SEQ ID NO: 9814 - DNA, 201 bp, Homo sapiens; identical to SEQ ID NO: 9769

SEQ ID NO: 9815 - DNA, 201 bp, Homo sapiens; identical to SEQ ID NO: 9761

SEQ ID NO: 9816 - DNA, 201 bp, Homo sapiens; identical to SEQ ID NO: 9772

SEQ ID NO: 9817 - DNA, 201 bp, Homo sapiens; identical to SEQ ID NO: 9762

SEQ ID NO: 9818 - DNA, 201 bp, Homo sapiens
ggagagaatggcgccattttgcggtacggaagctacacagcaacacgtataggagactctccccgagatcttctagggagtgacccatctatttttgtttrggaagaggaaactccgaaatgggatcgcggaagacttaaagggccaggctgatttttttttcctactggtctctgaggctgtggttgctacagggtcacc

SEQ ID NO: 9819 - DNA, 201 bp, Homo sapiens; identical to SEQ ID NO: 9763

SEQ ID NO: 9820 - DNA, 201 bp, Homo sapiens; identical to SEQ ID NO: 9764

SEQ ID NO: 9821 - DNA, 201 bp, Homo sapiens
aaacctgtggaatgccgagaagccgtgtaatgaaataacgtcacgcctgcccctcaccattactctgaccagggttcgaaggtcacacttagagcctaagrggaaatggagaagtgcaaagggacgagcagaatggctggcaccacctcagctgacgtgaagatgagcagctcagaggaggtgtcctggatttcctggttc

SEQ ID NO: 9822 - DNA, 201 bp, Homo sapiens
tccgatggcctaccagctgcagctccaagccgccagcaacttcaagagcccagtcaagacgattcgctgattccctcccccacctgtcctgcagtctttgwcttttcctttcttttttgccaccctttcaggaaccctgtatggtttttagtttaaattaaaggagtcgttatcgtggtgggaatatgaaataaagtagaa

SEQ ID NO: 9823 - DNA, 146 bp, Homo sapiens
cctcccccacctgtcctgcagtctttgacttttcctttcttttttgccaccctttcaggaaccctgtatggtttttagtttaaattaaaggagtcgttatygtggtgggaatatgaaataaagtagaagaaaaggccatgagctag

SEQ ID NO: 9824 - DNA, 201 bp, Homo sapiens
tctggagccaggaatccactctgtgggttaggaaaggccctcaggaggcggagggaaacctgtggaatgccgagaagccgtgtaatgaaataacgtcacgmctgcccctcaccattactctgaccagggttcgaaggtcacacttagagcctaaggggaaatggagaagtgcaaagggacgagcagaatggctggcaccac

SEQ ID NO: 9825 - DNA, 201 bp, Homo sapiens
tctgtgggctccgtggcaatgaattcttctgtgaagtggatgaagactacatccaggacaaatttaatcttactggactcaatgagcaggtccctcactaycgacaagctctagacatgatcttggacctggagcctgatgaagaactggaagacaaccccaaccagagtgacctgattgagcaggcagccgagatgcttt

SEQ ID NO: 9826 - DNA, 201 bp, Homo sapiens; identical to SEQ ID NO: 9822

SEQ ID NO: 9827 - DNA, 146 bp, Homo sapiens; identical to SEQ ID NO: 9823

SEQ ID NO: 9828 - DNA, 201 bp, Homo sapiens; identical to SEQ ID NO: 9825

SEQ ID NO: 9829 - DNA, 201 bp, Homo sapiens
gtgatagactgcctcttcctcaaggaacaaacaacaaatggctctgatggtttgtagcctgcctaattggaagaaaggcaacacagaagtttgagagcccrtctagtccagagaaggggcctctggacagaggtgggaggagtgggggacagagtggtatgggttgggctgcgaagggagttgcctcttctttacatctac

SEQ ID NO: 9830 - DNA, 201 bp, Homo sapiens; identical to SEQ ID NO: 9825

SEQ ID NO: 9831 - DNA, 201 bp, Homo sapiens; identical to SEQ ID NO: 9822

SEQ ID NO: 9832 - DNA, 146 bp, Homo sapiens; identical to SEQ ID NO: 9823

SEQ ID NO: 9833 - DNA, 201 bp, Homo sapiens; identical to SEQ ID NO: 9825

SEQ ID NO: 9834 - DNA, 201 bp, Homo sapiens
aggcgctgggttcctggaaccccaagggagcactgagctgagtaagtttgttcctgtcaattgggaaccccctcaaccacttccattccccaaatacctgygctgctaccgatgcctcttggagaccaaggagttagggtgccttctgggatctgacatctgcctcaccccagctggcagcagctgcatcactctccacaa

SEQ ID NO: 9835 - DNA, 201 bp, Homo sapiens
tccttagtgtgactgcagcaaactttggtgtaaaattccaccagtttccagccaccttcctgacttctatctgggcttggccaggacttctagtccctcayaccagccctccttgcctccctccagccactggaccccagccttggctcttcctcttggttgacgcccttcagcacacttactgctactctgtacccccag

SEQ ID NO: 9836 - DNA, 201 bp, Homo sapiens
ggatgaggtgagggaaggcgctgggttcctggaaccccaagggagcactgagctgagtaagtttgttcctgtcaattgggaaccccctcaaccacttccaytccccaaatacctgcgctgctaccgatgcctcttggagaccaaggagttagggtgccttctgggatctgacatctgcctcaccccagctggcagcagctg

SEQ ID NO: 9837 - DNA, 201 bp, Homo sapiens
ggtcctcttaatagtgctggtcatgatgagcttggtgtttggtaagtttgttcctgtcaattgggaaccccctcaaccacttccattccccaaatacctgygctgctaccgatgcctcttggagaccaaggagttagggtgccttctgggatctgacatctgcctcaccccagctggcagcagctgcatcactctccacaa

SEQ ID NO: 9838 - DNA, 201 bp, Homo sapiens; identical to SEQ ID NO: 9835

SEQ ID NO: 9839 - DNA, 201 bp, Homo sapiens
ccaagccctctacacggtcctcttaatagtgctggtcatgatgagcttggtgtttggtaagtttgttcctgtcaattgggaaccccctcaaccacttccaytccccaaatacctgcgctgctaccgatgcctcttggagaccaaggagttagggtgccttctgggatctgacatctgcctcaccccagctggcagcagctg

SEQ ID NO: 9840 - DNA, 105314 bp, Homo sapiens
agtttgctgatatcacaggagatctgctatttgatcattttgcctgccaacttggatgtctgtctcagcaggaaaccatttaaagaaaataaatgaattctcagcacttgacattttctggaggacctgagtcctttccaagtgagctcatatcaagcacagttggtaagacagagacgggaaaatgtgctttctccctgttaagaggacagcctcgctgaagcatcttgggcagggcagtattaagtgacttttccttgttgatgaggggtcctctcacctttgggagagaggtggccctccaccctggaggggctgcaggaagtggaagcaggttccatagctggggggtgttacaagtgagctgaaggagaagtagcatggaattcctcctcattttctctcccgagtccaccctgcctcctccttcccaacagcttgtttattacagcatggtgacttggggcaaygtgattatatgagatggtttttttctcccttctctgtcctccytcctgggcacagtgtatatagtatgagagctactgtaatgaaaggtgcacaggcctttttaggaaagtgattgcaggtgaggccaactcagccaggaaaatctcctgttgcttcctaggatgggtcaggggaaaaggagagggactttaaaacatggatacttcagacctggctgcacactggactcaccaaggggattaaagaaaaacaatgcttgggcctcacctccagagattcagatttaattgatctagggagtggctggggtatcaggatttttaaatctccccaggtgatgctaacatgcagccagatgtaaagatggtaggtttagagggagagaatgcaatggttttcactgttgtactgcagggtgatgatatggggcagggcaggagcctattccagcccctacacctgtggacacttgcgttagaggtgtccacacttctaccttgaagctgcagcactggaatacttcctccacactgctggtgctctggagcctttgactagccagggggccgctgagtaacaaaccttcccactgtctccttccaccatggaccaggggcagccatcacacttcctcatgttttttagtgacattacttatcatttaccttaaagtaaatgataaataaaggtggacctaggggtctctcttgttyttyctttctttcttwctttctttctttctttctttctttctttctttctttctttctttctttctttctttctttyttctttctttctyatttttctttcttttctttcttttccttctttccttctttcttttgatggagtctcactctgtcgcccaggctggagtgcagtggcacaatcttggctcactgtaagctccacctcccgggttcatgccattctcctgcctcagcctcccgagtagctgggactacaggcgcccgccaccatgccaggctaattttttgtatttttagtagagatggggtttcaccgtgttagccaggatggtctcgatctcctgacctcgtgattcacccgcctcagcctcccagagtgctgggattacaaattcctttcttttttaagagacagggtcttgctatcactctcttccaggctggagtgcagtggcgagatcatagctcactgcatgctcaaacccctggcctcaagcaatcctcccgcctaggcctcccaaatagctgggactgcaggtgcacaccaccatgcccagcttcctcttattttcataaaagaataatttgtgtgtgcacatctttctttggaatcttggattgatcaaaggaggtatagttattacatgtgtcytacatgctgaagttgaaagacaaaactagagaagaaaaatgcctagtttctgtgggagtgattataacaaaatagctaatatttttgagmtactatttatgaagtaatcaattaagccattacaataattctgtgagctaagtaccaatagtatccccatttggctcaccgtaataatacgtaattggctcaatgaaataataatgcgtccagggatctgagatacacacttgagaaaattagtggtgagtcaacataattgccaaattatatgatattattataaagcaaagctttgggtgtaatattaaggcctatgtctctttctgtaaatggttaaactgaggcaccgagcagcctgcttaatcgaaatcagagcacaaaagaggggaggaggtacaatcctctaaaacacatactgtcatcaacctcttcatcttgaaatattcaattaaatgttatccaaacccaaagttactaatgaatttggaaatgagctggctgtgactgtgagtatggaaattggtggagaggagaaactccagagactggggaggagccacaggctgcctggcttcagagttgttaggtagaagagaaagcagacctggaaagaaagatacagggagggaaagaaggaaaagggagataaaaattacagaaccattgaaggaaactgctccacagtttcccctctgcctttgggcaggagaatgtctcaagagcgttcccaagcttcatgtgcacaggaatcagtggggtcctgtgaaagacgacttccattcagcaggtctggggcagggcctggcactctgcatttccaacgctctctcctaagtgatgcctatgctgctgctggcccatggacctccctgtgagcagatgggtccactgggatcctctggggagagggtgattgaaaccccctrgaatccttctcccatacctctgacactcagacccatggtctcccacccccgtcattgctacartggccccggtaactggccagttttgtacttattggagtctgggggagtgtcatgggaaccacgggacaacatgagcaagggagagtgagcaaactggcagctggaaggcaggcaggctaagttacccaaatgacagaaggaagagaaggacaagaaggcagagtctgctcactcactcaagtcaaggtgattaatctctctatgcctcagtttccaccctgcaaaatggggatactattggtacttagctcacagaattattgtaatggcttaattgattacttgataaatagtatctcaaaaatattagctattttgttataatcactcccacagctagatgtcagcccttgcatgaaatcaagcattcggcaaacatctatgcagcgtggactctgctgggccccagctgggtccctgagcagagggtctggattggccatacctcatttatattgagatgaatgaactccttgttctttgtactgagagcctggaacacccctgataggaragaagggggaaaggcatccttttaaagacaattcctttaccaagtttgtttcccagcgaccaaagggccttccagtggagcctgtggggaagctgctccatctggtggtaaacaaggactttcatcaagggcggcgatgggactctcatcaagggcgggctgaaggtgaacttctctgaacggatggaggcatccagtcctgtagcaagccagtggtcacctaagccagtcagccggccagcagctcctggagccaaagcaacgcccctatcttaaccttctggggggtacagggcccttgaaatccataggccccagaaaaaaagcacacgcacgtaaagttttgcatgaatctgaaagttgttagtctcgcccttgtaggaaggtgccgtgggtgctgtcagaggacagagtggcacaggagagcgtgccagcactgagctgggggctgggtctaccgcatggtgtagtgacctgagtgcacctgagcaagtcactgccctcttggggcctcagcctcctcaccttcagaagacgaggtcgagccaatcagccctggcttcacttgagaatctcwcgggtagctttaataatacaacccaaagcggggtgggggaccatcactggacacaagaaatggaagagacccaacaaccaaacatggtgactgggtcttgtgtggatcctgagtcaaccaagcaactgtaaaaaggtggcctggaagacttgggcatgaaccgggcactagagaatgttgagggtttgctgagaatttcgttaggtgtgcaaayggtatgaagatgatgctaaaaacaagtctatcagctggagatactcagatgaatggacagagtttctgagatctgctattaaattatttagggggaaaatgtatgtgttgcgggagcacaagggaaaagttagcaagatggtaattgttgaggttgggtgtaaaggtctggaaacacctggcgaatttgcgtaactcccaatgctgtgtgccacccctgagattctaacagaattggtcaactgtgcagcctggtcatcagcatttctttaggcacccctggagattgtaatgtacagcgaagtttgagaagtgctgatgtggagtgcatgggaacctattatgattctttatatctaactggagggttgrcattcttacaataaaaagttaaaataatactgcagcaaagctccatccttggtaattctaaaagttctccaggcaaatctaatgtgaggatgccagagtggatggtgttaagcctaaagggtcttcaccctaatattcctctactataagaaaagctgaggcactcccaccccccgttctgggaaggattacacctgggtggtttagaaagggaaagagcaatggagagaagagaaactagcaaatctcattatttctagggtcagctctgaccaccctgtaagtctaataacrgattctgtttcaggaggggtctttmtagaatgcacctctcactagctaccagtaaccccttagggaaagccggcttcctggcttgatatactagaccctttggggcctgctggtctgtctctgattttctctcatcattccttaatcaacacatactcattgattgtccagaaattacggctctcctggagcttagagtctagaggggctgtgcttcaggcaagtaattagtgttctattaccaaagaagcagagggagctatcatgctgataaccaagggtcacagccctcacctttttattttaatttaatttaattttattatttatttatttatttatttatttatttatttatwtatttatatttttgagatggagtctcccactgttgcccaggctggagtgcagtggcaaayctcagctcactgcaacctccacctcccaggttcaaggggttctcctgcctcagcctcccgagtagctgggattacaggtgcataccaccacatttgactaattttttgtatttttmgtagagacaaagtttcgctatgagctggtctcgagctcctgacctcacgatccaactgcctcaacctcccaaagtgctgggattacaggcgtgagccactgtgcccagccccctgccttttttttttttttaatcaagtattcatacctcgaagtggcctatggaacayagattagaaaataccaagcaggacaaaatggaaatgcggggccccctgctcctaagttgtgaagactttcaagatggaaacgccagaacattaaaccaagcacgaggcacccttgagggcacrggtcctttggcacctgcacacagggcatgtcctcatagccactccagtactgagttacaggccctggacatgcttcactcagcctcaccttcaaaaccacctttgaggggcaggatggctatgacaataaactgcaaacactgaagcgcacgggcacataatccctctctatttgtggtgtaacaaatcttatttgarataactgggtcaatgtctagggcttacagggcggggaaggggggaggaagggggactgagactctcctgtttctatatgctatgatgggatttgacctgcaattgaacctttcctcaaacacaaggcacaaacctgccccagcccatcatcctcccacagaggcactgtgaatgtataaagaaaggcgatgctaagaaacrtgctgcaggggaggctggcacattctgctccttagctaaccgcacaggcccatgggtccacacacatcagaccatggctctctgtggtctatctttgccattactttaaccaggctgtttctcatgcgctcatggagggtgactgaagatgccaccccgaggtgcaccctcagcctcgctggacacttacggctcgcattctccagccggaccaggcagttgaggaagtcatcgaagtccagctggagctcctcatccgcatacctgagcacaatcagctgcaggaggtggctgctcagctgaaagcctgtggggacaaaggaggagacccaggactcgctgtatccgagccccgaggtgagtctgcacctttgagggagctcccaggcagctgaggagagggctcagaagaggaagccactgtttcactcctcaaagckggggtccccagacccagtgggactgctgcccttggtgtgaatgcagcgtgagagtgtgaatctgtggtgcaggggcgagtgtgcgggggactctcaggcgtgctttctgtgtttaatggcttctgagtttagcgagtttgtgatcttaattttgatgctaacatcacccatasagtctcgctgactttacaggaarctttgtttgggggaacttaacactgggtggtgtctgagccccaagttcattcctacaccagcctcccctcgyrttctatgtctcaggtcacttccagctgtggccctagaaagtttcttggaggggatgctgctgcccacggagaatgatactctgccagggcccattcctacacatccacgatgggggaagaatgacaggctatagccaggaggcttggatctgagccctggcactgctccagccgtggcatatgggttcagttctctgggctttggtttcctcattgtcaaatgaggagtttagacaaagtgaacttccttctggatttgatatttagatttttttttttgagatggagtttcactcttgttgcccaggctggagtgcagtggtgcaatctcggctcagtgcaacttctgccttctgatttcaagtgattcttctgctgcagcctcctgagtagctgggactacaggcacctgccaccacaactggttaattttgtatttttagtagaggcggggtttcatcatgttggccaggctgatctcaaactcctgacctcatgatccacccacctaggcctcccaaagtgctagcattacaggtgtgagccaccacacctggccagtgctttgatttctaattagtgcccttagaagtgatttctttccccctttcatttttgtctacatgttcactttctaggaggtgttcacaggattgttcagaaatccacccagggtctttctgcttcttcctaattccagcagaggagcaggcaggtcagacacagagcacagagtcyctggagcctgcacggcagtgctggctgccagccttggccagaatcctgatgtttggggctagaggagggggatgaggggcgattctccccacaccacgtcagggtaggaaagacacagccatgcccctcctctctgagtgctccctttgtcccctgctcagttcctcctcctaccatggaaacagagtcatcatcccctaagaaaatcaggcgccccttctcagcctggcactttgctcatttataaatcatctgattttcttctccctcacataggacccgagatggtcctggctgtgtatacttcatccttttatcaggcctgagcctggacatgtttccagattttgctttccctgggagrgaaccactttaaaaggttcaggaggcccctatctgtgaggtgtgcttggtgagaagcgcaggcagcccggcaggcgggaggtctgcagagcgctygtggaaactacggttgtgtgtgcaggacatgggaccacagagatgccgacagccatccagcaccggacaagagtgggaaatgccacctggagcccagcctttgggtaagggagcagggtataaactatgatgcagtcatccattttggattcagagtctgatgctgataaaacccgggacagggccacaggtggcagagggacgtgcggaccccaaaccatgggtgctgcatgctctgtctcatccacgataacaaccatctgagagcagaaatgagaagtttggaatcactgcagcttgccaccaaagagccatgtgttaagtactgggccagaaaacatggtcagaggctatgaggcctccagagggcaggccaagttcatttttagcagatacatttaaaaagtttctaccaatgttcacagtggtttaaaatgagggccctggtgtcaggaagtgagtcctgggtctgaaccctggtgccaccactccaagggccrtgaccttaagaatcaccaactgggctcagaggcccacctcctgggcagcagagagaagacctgccatctgctcaggttgcccacaggcagtacctggcatgcagtcagccacctgtactccagtcttttctttacctgcagctttcagtgcagtccgtagttcataggtagayatggtgccggacttgtcagcatcaaaccgaaggaaaaggttctaaagggtggagagcagaagccttgagaaggagcgtgcctgaaaggcatcgctgrtggcagtaaatggrtgacagccagcccsggggagctaccctctaggggccgcagaggccacagttggactgggccttccaaaagaagtcggtctcccttttgtcttccttttcgtcttgggtggaagcacggtggtactcccgtaagyatcggaatagcatgatgctgttttcccttctcccctgtccraatacaattcctctagcctatagcctgcagcctgctgcaccattttaaatcccctctgctctaggttcactgggtcccccagaggccaagccctgctccaggttacatacaatccactgcttcagcttgtcccagaacactttgaattcatcaaactccagcttcccattgccgctggtctgtgccatgtgggttaagggagacatgagcagtgtttcaacctgaggctcctcgtgggacctcagctctgggactgcagagggggagggccgatgggctggcctgggtgcacaggtttggggccctggggaagtggttttaatgattaaaccacaaatctctgaagaggggaaacggcagaagtggaatgggggtggtccyggaaagttcacaaaaacagaactctgttcccttggatgggatcccaaagtggcaagaagacccccaagtcccttcaaaagctccccacccccaccactrggcagtcttgtgcatcttgattctgatccaatttcagcatgggggtcccccagctttgggttattttctgtgaagaagactattctgctggctaaggatgtcatgttcttggagagtctgcactattgaagattactctactgtgcttaaagcccaggatccatgtctatttctgctcaaatatttggaaggatacgtccatcagggaaatgatgtttttacaggagatcaggcttagcttcttgaatttgatgtccttttctgaaattgcacatgaaagctgaattcagttgacccgataagataaacctatgtacccatctgctgaaagcccaataatgtggctaaatccagggctgttgggggctgtgatgtggctactctcttatgatgctggtaggagtagaagttaacatgacctttcagaaggaaaattggctaaatgtgaaaaaagcaataaaagtgggaatacgccttcatccatttattctagttctaagaaccccgagcaaagaatwacatatgaagatttttgtcatcatattatttatagtggcaaaaatttggaagtgaaataatgaccaatagagaggcatggtcaataccttaggctatgtctatataatgaagtattatacgacccttaggaatcatgtttttgcagcatatttaatggcaggatttaaatttgttggagaaatttgtactcccatactgctgctggtgaaaatgtgaaatagtcactttagaaaacagttggatagtttttaaaaacattaaacatagagttaagcaatcctcttaactaaacatataattaagaggatggttatgccaccatgtaaccatagactgttgcattgtgatggaaccatcctcataactatatacccaggagaagtaaaaacacatgcccacccaaaaaacttgtataggagtgtttacagttgcattattcataatgaccaaaaaccggtaacaacccacgtggccaccaatagatgaatgaataaacagaacagggcccatccatacgatggaatgttgtctggctgtaagaaggaatgagacattgatacatgctacagcatggatggacctggaaaacatcacaccatgtgagaaaagccagtcagaaaggaccacatattgtatgattcctttttttccccctgaaacggagtattgctctgttgcccagcctggagtgcaacggtgtgatcttggttcactgcaaactccacctcccaggtttaagcaattctcctgccacagcttcccgagcagctgggattacaggtgcccacaaccacacctggctgattgtgtgtgtgtgtgtttatttttagtagagatggggtttcaccatgttgaccaggctggtcttgaactcctgacctaggtgatccgcctgtctcggcctcccaaagtgctgggattacaggcgtgagccaccrcacccggcctatgattccttttatataaaatattcagaatatgtaaatagaatctatagagaaartagatgagtggttgcctggggctgggggaaatgggtacagggttaacactgttaatgggtaaagggtttcttgttggagtgatgaaacattctaacattatatgtctacgcatatgacacacatgtacatacatgcagatacacatatgttaagagtggttatttatggtggtgagatcatttgtgactatctttgtcattaggcttttctgcatttttaagaattttctactataaacctgcatcgtttttggaatcaggaaaacaaacaatgaaagctatttttaaagtytacctacaaatcagccctgggaagcagatctgcggctcggaggagcagggaggggacccaggcagtgtggtcgcttgtccctccataggtgccccaggacccygatggggttggcacttactcttttgcagcacagcatttaaaacatactcaagttcctctgctgtcacctccatgtcctgttgaagtggagacaattgtttkttatagcccttggcaccttcttttatagtttatttttgttttaaatcagttctgagcttcatttggctccagtgacagaccagccttcaggaccctgctgtgggcagatgtacctatctcctgtgtagctgcagctatgtgtctcatatgtcacatgttttagggrcatgccagcccaactaggagagagcctaacttgagagacatcccaacccaggaaagcgcatgaaaagctgggcagggcaaggcagtggtttcccagcttccctgagggtcagaaccaactcctggaattgtcctaagctcctcagatgattcctatgttggaggcagtttgggaaaaccagactgagtcttcctctgtacagtagaaccacctgcagagctttaaaatagtcccgcatctggggcttaccccagggaatcttgaaatcagaggacctgagaatatggtcctatttttaagacctaggagttgatttagaattaagaataagggtgaatttcagaatcatggatctaaggcactccaggaaatctcagcagcccccaccccagaagctggttagaaatggagagtctcagaccttgccctgagactcaggctttttttttttttttttttttttttttgatacagggtcttgctctgtcatccarattggagtattagtggtgtgaccacagctgactgcagcctcaatttcccatgctcaagcaatcctcctacctcagcctcccaagtagctgggactataggcatgcaccaccatgctgggctgattatttttgcagagatgggctctccctatgttgcccaggatgctcttgacctattgatgaggaatctgtgttttttttcccaggatgcccaggtgactttatgcacatgtgtgtttgagtagcactgacatagacctcattttagtcagggttttgcrctagccrtgtgttatgctgtggagtgcttctaacacatgtccgtcctgaagcctctgggcctggggaatgggggtttgggatgtttggtgttggtaagaaagcactgccccagccaggcccccactgaaagaggaggaaagagaaatggagccatgtgcccaagtcatccaactacttggaagaaaagcaggacatgagtcaaggagggctgaactctagaggtactttttggttgttaataaaggtcgactgaaactcctgcaacattcaccgcttcccttccaaactctggatctccatctgacaacttctgcgcacccgcatgaacctctttaactcctctgagcctgtcttgctgggtctgacccagcatgctccagatagcacctggagcagggaggtcaccactgccttcccccctcaccatgctctgtcccgcccagggctrcgctcagccaccttcctgctgtgctttaagcagtcacatgagcccccattttctccatccgatcctgtggtcccctaatctccctgycttgcctgtttattgcagtgcctaatatactaccatcagacagcccctaggtttagatatcacccctccaggtgacccctttcataattcaggaaccccagtttggggaaacacatgaagctaatagagtcattagcaccttgacatgaattagttcatcagctcattgtatttatggctccaagagagcacctctggggcagtttctagaaagacttccctcccctgaccccagcaggtggaggaagagcctggatctgtgtgaggctccatccagtgtccctaaaaaggaagctgagcagtggaaagagctaggatagggtgggggacaggaagttgcaattgaatagggacctccttgaacatgatcccctttactacagcaaacagagtattctaatggcagtgattttcaggcagagttcaaaggagtcacctcttcaaggcttgctctagcctcccaaagaaagcacctggggccaggcgtggtagctcatgactgtaatcccagcactttgggaggctgaggccagaggattgcttgagcctaggagtttgagaccagcctgggcaacatagcaagactctttattatttatttttttaattagctaagcatgatggcatgtgcctatagtcccggctactcaggaagctgaggtgataggatctcttgagcccatgagtttgaggctgcagtgagctaggcttatrccactgcactccagccagggtaaaagagtgagactctgtctaaagcaaaacagaactaaaaaacaaagcgtctgggcctattccaagcttctttgggctcactggccccatccacagccgcagactgtgtaagtaaatgttgtaaacagggtggtctttgggccttgaatgatcagtgctggtcttactttgcaacaagctccatcatgcctcaggatgacgttgctgaccaaccccacgactgcaaccctttgctaggaagcaggtccaggccctcagcctggtggggagatggaagtggggcatgtcctacctcaccagcgacttgttcaaacagagcccgaaaccrctgctcctcctctgtctcctggtcaggtggagttggctttggaggctaaaaaacagccaaagaaacttgcacaaaatgatccacaaaaaagaaacatgacaaaaatagcaggaaagaagccaggascctgtgtgcccagccccatgtcaccctcctgaggcrgtgtgcacaagctgcgtcctgtagcgtgaggaacattttctcatgaaggctcttttagaaggtgagactagaaggactttattagctggacctgtggagcccttctgccttacagacgaggaggccaaaggaccttgacccgtgcctaagttaggtcctggccattggattttcatgcttcctgcccttcctctggcttrcttcttaccaccctggactggaatgacttacttcatcatctgttttgatagctggtaaaatcgttgaaggcaagagtctgtttctaccactaagctctgggcttggtatatagaaagagctcagtaaatgttttgggtgatttttggtttctttggttttttagcaccattaataagctgtgccccagcatggaacagcaaattccctcctaaaagcagatctctgctgtccctggacgtgtcagactatttccagctatagtatctcagggcctcttgcgagtcctccagcccttggacgagggtaaagccacccccatgtcaccccttccacaccacataacataggggagatgtaatrtgttcccctgagtccacagtaaaaaacatctccctgcctctctggttttcttttcattgattagatttcttaaaatacaattaaaagtctacccacttcagaagcggcagccttctctcaggtggagttggtagtgtgaaagttattgagtcaaaatgaagtcactaatgttaagaaaaccctgacaaatagagctcgggaaggccagaaggttctcatgcttatttgcctgataacaaaaatatcacaaaaggctgcaaaacccacaacctttcacagaggccctcgcaaccatacacaaaaatacttctacctctgcctagcaactgcctgtccaacatcagactggcttcacttttgttattgatctttgtagccaaggataattatttcaaaacaattatgtaatccttctcattttttctttaaaaacctttgtcctcctttacctccccaaataggtgcatagtttactatggcatgcaccttcccattgcagtgctttatccctaaataaatagcttttcttttagagagtgtctctgtgtttgttatttcagttgacagtagcacagaggaagatgacatsgaacagaactttataccaagcacccacctcactcccatgccaggtccttgtggactagaagagcacagactagaacacacacatcttggtctccaggaggttagaatcatagatgcttacttgattgcatgtaaccatccctgaactgcagagttttacatgatgctgtgattagaaggaaggtttccagaaccatcacctgaatcccatactccatagcaacatcagaagactcacctcaggaaggtcaatgtctacatttccatccatatccctgtaggggcagaaaaacacactgcctcaattgtggattaacttcccattgggatctgcagagctgaagagcccagagcctgggaaggttctgtccctttgaatcccttattgttcagtgctgtttacatttcacagagtttgcagaccccatgcattgacacccccacccttagtcactcagaccttgctcagaatgtaaataagagggacagccattgtgttagaccattcttgcatggctatagagaaataacagagactaggtaatttataaagaaaagagatttgattggctcatggttctacaggctttacaggagcacagtgctggcatccgttctgcttctaaggaggcctcaggaaacttacaattattgcagaaggtgaagggggagcaggcaagtcacatggaaaaagcaggagcagggtggtatgggggagttgccaaatacccttaaacaaccagatctcgtgcaaactcactatcgtgaagacagcaccaagccatgagagatccgcccccatgacccaaacacctcccatcaagccccacccctaacactggggattacaattcaacatcagatttggtggggacacatattcaaactctatcattctgctatgggccctcaaatctcatgtccttctcacactgcaaaatataattatgccttcccaataacccccaaagtcttaagtcattccagcattaactcaaaattccaaagtccaaagtctcayctgagataaggcaagtcccatcacctatgagcctgtcaaatcaaaatcaagttccaagatatacaaattccattttatacttccaaaatacaatgggagtataggcattgggtaaacattcccattccaaaaggccaaaagaaaggggctacaggccccatgcaagtttgaaacccagcagggcagtcattaaatcttaaagctccaaagtgatctcctttgactccatgtcctacatccagggaacactggtacaaagggtgggatcccaaggccttgggaagctctgtccctgtgactttggctgctgtcatgggttgttgagtrmctgtggcttttccaggctcaaggtgcaagctgccagtggatccaccattcttgggtctggaggatgatgrccgccttcccacagttccactaggcagtaccccagtggggactctgtgcgagaccttgaacctcacatttccccatctgcatagccctagtagaagttctctgtgagggctctgtccctgcagcargcttttgcctaggcatgcaggcttttccatacatcctctgaaatctaggtggaggctgccaagcctcattcagtcttgcactctgtgtgcctgcaggcttaacaccatatggaagctgtcaaggcttatggcttgcactcttgcaccctctgaagcagtagcccaaactgtatctggtgcctttgagcagagactggagctggagcagctgggatgcaggtaacagtgtcctgaggctgcatagagcagtggggccctaggcctggcccatgaagccatttttttcctcttaggcctctcggcctgtgatgggaggaggtgctgctgcaaaggtctctaaaatgcctttgaggccttttccccattgtcttggttatagcacttggctcttttyagttatgtaaatatctctagcaagtggttgctccatagcctgcttgaattcctctctcgaaaaagctttttctttctctgctatatagccaggctgcaaattttccaaatttttatgccctgcttcccttttaaatgtatatattccagctttaastcatatctttgctcccatatctgagtataggttgttagaagcagccaggtcacatcctgaatgctttgctgcttagamatttcttcttccagataccctaaatcatcactatgacgttcaaacttccacagatccctagggcatggacacaattcagccaagttctttgctagggcataacacacataacctttgcttcagttcccaatgagttcctcctttccatctgagacctcggcagcctgaacttcactgttcatatcactgtcaacagttaggccataactatttaaccagcctctaagaagttataaacttttcctcatcttcctgtcttcttctgaggccttcaaactcttccaacctctgcctgttatctacttccaaagtcacttccacattttcagttatctttataacaatgccccactcttctgtaccaattttctgtattaggctgttcttgtactgctataaagaaatacctaasactaatttacaaagaaaagaggttcaattggctttacaaagaagcatggtgtattccctagaagttaacttaactccttgacttctagggagacctaggaaactacaatcatggcagaagggggaagagtcatgtcacatggcaaaagcaggagcaggggtggggcaggtgccacatactattaaccacatctcacaagaattcactcagtatcacgaggatagcaccaagccatgagggatccacacccatgacccaaacatctcccaccaggctccacctccaacattggggattacaattcaacttcagatttgatggggacacatattcaaactaaatcagccatcaccaagaacttgtgaattctggatttatgaaactaaaagaagttargccagcagtcactccttatttctttaatgtactttaacaagggcaactgataaagtgttttgtagaatagcrgcacctccaaagacgcataaacagtgcagttgcattacacattcactctccatgaactttgcatcttcaaaggagatacatatctgttggagaccattcagcctattgagtggtaggcactggggagggggtgcattttaaaagattacaaagttgaatcagaaccaaaaaaaccaccwttttttttagacggagtctcactctgtggcacaggctggagtgcaatggcatgatctcggctcactgcaacctctgcctcctgggttttaagtgattctcctgcctcagcctcccaattagctgggattacaggcacgtgccaccatgcccagctaattttgtatttttagtagagatagggtttctctgtgttggccaggctggtctcaaactcctgacttcaggtgatcctcctgcctcggcctcccaaagtgctgggattacaggcatgagccaccgtgcctggcctaaagaycaccttttgaagctgcatccctaactcctgcctctcatcacagatgtaaattcctgattccactggtggggttggggagggatgggtgtctctgtgcttatgttagggaaaaagaggaaaaatgatgcaatcatgtttttttgctattcacatatttagggggacttgtaatatttggatagtagtaatattaagaggaggagcaggcttcagcttttgatgatgctaaaaacatttggaagaatacagtctcatagactaaaacttgaagggctctcaaagaaaaactgatacaaagtcaaagggaatacaaataaacattaacatcaattgggggtagtcctccctttcctcctcatcccctgggcatccataacataaccctttcagaacttctgtttgtttaatcaggagtctgtctgagagctaaaccaatgcraacacagctcagtgtgaatttttgttaccaagctacagagctgattcttatactcaatatcatagcagattaaagaatcttgttcagagcaagattgagtatggagttttttgccatgtacaagtcaccttatgcatgtcagtgactctgagctcaccccactaataagatagagaacaagaggcatggcattgscataacttgggtctctcttgttcttgccacccataagagatgtcaatctgcatggatctcatacagggtacttttgtgtgaacagatactaggatattcatccccatcttgtactagtatctgggagaaggctggagaaaaattctctggtagagtgtttaaaaattaaagacttttctgcatctatttagccaagagaaagaaccatgccttttgtaatcagcttgggaaaccccactagacttcataattgagagtcttttcaatgcatgccaccaatctaattctctctcactaaacgaaagatgaaactagagtgagtcatgyattcacagctgtctctcttgttaactctgtgcagattgatcttttgttggagacttatctagcttaaatacagaattagcagattttagcgttctccttaatctttagaatattgtcatcgggaaaagaaatggattcctctgtcttgaaccatttttccccctgtgccacagagcaaccaatggtgaatgggcagtaatgggaaacattttccatagaagtaactgatataaagtaatttcgctaagacactgtgaggaaaatgtggtggaatattgggtatgtaaaatgagaggcagatttgccaacatttatttaaattggagctgaaagaacatgtcattcttgaaatttgcaatagccacccccttcatcatgcccagaaatgtctagcatccctgcatgtggctcttatccaagaagcttcttggtaatagggtctgaaaaatgaaggtctccacccaagaatgtcttgtgagcatgactctgggaccagtagaaaacagcaacttttcaatggtttgcttgagggagcgaggagcagagctagaagggatatgtgccttgccttgcagataagctaagaaagtgtcctgcagcctggcgtggtggctcactcctgtaatcccagcactttgggaggctgaggcgggtggatcacctaaggtcaggagttcgagaccagcctggctaacatggtgaaaccccgtctctactaaaaatacaaaaaaaattagccrggtgtggtggtgggtgcctgtaatccttgctactcgggaggatgagccaggagaattgcttgaacctgggaggtggaggttgcagtgagctgagatggcaccattgcactccagcctgggcaacaagagtgaaacttcatttcaaaaaaaaaaattaataataaataaaagaaaagaaagaaaccatcctgccttgtttctcaggtacacatgggaaagggaagaatggagtcttggctccagcagttcccaggtgacttctgtgtgaataaaccactaaaagaagtgggattctggaagctgttcctctgactcaccgggtaatggcttttttctctgaaaagattctcagacagaaatcagcttcctggtggggctcaaaagtgctgggaatcaggatgtactccccagggggcagcttgaaccggtcggagacttctctcaggttgatgaacgtcttgcttctggcccgagaagcgtggtatctgaagaagtctttgttcaggtgttcgtctttgtcagggcactgcaatgggcaagaaagggaggggtttcctagggaagttcctcttggcttttcggacacaattcatggactcttggttgagtctcgggtgtgagaccgaggaggagccgcgaatttagaactcagatggagaactctgaaatgcagtgtggttcccacctacctcataaatggcatagccgattgtcagcacattggcaccaaatctcttgagtttccttctatctttctgcatcagggctacaaggaaactacactcctcctgcccctcatctttctcagtcagagacaattttatttgtggattggtccaaaaggtatctgtcatttgggagaggtagattattttccccttttaaaaaacaacccacaaagaccacacacacacacacacacacacacacacacacacgcacatacacctatctgccctcattatatgtcctaccaaacatgagaaagtaataccttctctccctgttcaataagtcctcctaccctacttttgataatccccaacgggaatgcaaaatatcctctctttcatttccaccttctcttcaaccatttcctatgcagtttcttaaggacattcttctgggtctagtctgctaaagcttgttctatcagttttttttccacttagtatttcaaaggagagtgcagtggacttctggttgtccccctggcatctacttgatggtgggccgtttgagtaggattgacctcgagcactgctccagcatgaattctgattggtctgtgccagtcctttttgccaccgaggattggacaaagccaatcaatgcatagcattcactggacaatattagttcaaggaatttccaattagagggaagttgagggcttttttttgatacccccaggagctcttgctgttcgtgtgaatgagggctcaggaagccctggatactgctgccagccctcctgtgattataaagaaagccagacagagaaagaagtcaacacataaaagagggcagaacagtgaattacaagcaaatggaaccagggccctgatagaactgtgcctgaagcccaccctacttttcctctgagctcttcaattatgtgagataacaaatcctttctattgctaaactggcatgagtcatgctttccattacttgtaatggaaaataacctaagtggtaaaacaaaggaggtttccccaaacaattcttatccaactaaatctttgcagccttttttccccagtcacttttgaaaccttactatgtttcaggctttctctgaggacccggcccttatcctttggtgtcctgagttggaagggacacttgggagtggcagagagagtgacaggcagcctacctacccaggaaattgcggcagcccccagccgtggagccgcgaacccagcttccctgatggaccgtcacctcccatttgtggatcgcgtcttcctycagggcatcgggagtgaggttgcagatctccactttatcaaaktgggccttgaagtcctkaaatgccatcctgcagcaaagckgagagacacgatgcacaggagggcaagagtgagggcatcatccattcactcattcattaaatcattcacttattcattaaatcatcttgttccygtccgcaaggagtggggggactgcaaagtgtggggagatggaaaattttttaaaagtaaaataaaggttaaaaaggtaaaaaccaggctaaaaatatagattgattgtagatgttaagtgctacagagaaaaaccaaattgggctgaaggatgggagcgtaggggtgggatgctattttaaacagggaggtaagagaagcccttactgatggggcacattctgagtggagacctgaactaccaggtcctgggcagggcagctctctgggggtctaggcagatggacagcaaggccccgaggcagagaggtgcttgaggtgctcacagaacaccaggaaggcacgaggtgtctgtaaggaataagatcaagagatcatagtacrtcaaataggtatagggattttggctttgactctgagaagatggagagcttttagaaggcagtaaacagaggagtcacatgctccatggctgctgtgttgagaacagaytttggggacacaagtggaagcagagaggcagctaggaagttagtgccggtgtccaagtgagagacaagggtggcttggtccaggctgatggtatgggaggtgatgaacagtggccagatttgagacacattccaaaggtaaattttataggatttgctaatggactggatgtggggaaggagcgaatgaaaggaatcaggatgtttgatttgagtgactggaaggatggagatggggaaggctgtggtggggcagtttgagagagaagctcaggaggtcaggtttgggcacgtgaatgtgagatgtctattatacattcaaggagagatgttaaagtagaccattgaatatgtgactctggaatcctggggaaaggagctgaagatagaaacctgagaattagtgtaaagatagtttttaaagtcaagagaccagacgagacgcctaaagagtgggaatagacagccaggagggggaccatggatggggtcctgggacacctcagtgctaacaggttagggagatgagagggggccaggacaggatgttgagaaggagctcaggtaggaggaggaccaccagggcgtgtggtcccccgcaatccagcacgtcaagggctcctgatggatcaagataatctgatcgagcaaagtgagagtcggtggcgtccctggcaagatcagggtkagtggggtggtggggcacactcatagctgagtggagtcgagagagtaagggagaagaggaacyggcgggcttgctgtagaggacaggagagagctgggttggtcacttgagtgggtcaagagaggctttttttttctttgcaggtaggagaaatgatagtgttggagtgctaaggggaatgattcagaagaaggggggaattcatacgtaaggggagagaagagagttgcaggaggtacatcctagagcyggtgaagaatggaaagaggctacacagggcttcagagtcaggattccaggaggaagggctccacgcacagagtgcatgatttaacaccacccatcaccttgggcaggctcagcccwggtgttggggctgctccttcaagaggggcagggcaatggatcactcacatggacgctcttctttgtggagcytcctgctgtgaatttccgagtttcctctgcccggcttctcccaccgtctgcaycmgaccttctttccactagcctgacctcaggtagcctctcaaactctggtttctacctcctgctcatatgcagcaattactgtgatgktactaattccagaactcagctttcttcctgcagtttttgctcctctcttgtaaccccytaactcaaagtcccctgtacttcaaaattcaaagtttatctgtaatttctaatttgacagcttgggaatctctcaagcaccctgcatgtgttccacaaatctggggaacctaaaccctcatggttcccgaggcagagatggctggcagtcatcagcacaggaccaagactgcaccccaytccttccatttgggagtagaatgtgagccgtgacgcatttacttctgagtcaagatttttagaaagtgagagtgtctttttcaatgttttattttattcttctcttctgctggctatgtgcagatgatgacgtgaccytagaagatggcagagccacacaatagaaggcgtttgggttcctgaatcactgtatgaacagagccacccacagaatatgaacatcctccctggactgtcataatgagtgaggaaaaaactttactgtgtttgagcctttatatatttggggtctattcactactgcagctagtgttaccttgagtcattggtgccttgaattacagaactgccacaacgaaattctaaaatatgttagcagttgagcaagagggatcatggaactgttcgagctggaaaatggttatctatgttatgcagtggcaaaacattgggtaaatctgttgcatgttgttatggactgaatgtttgtggtctcccctaaattcatatgttgaatcctaaccctcgaagtagtagtgtcaggaggtggggcctttgggaggtgactaggttgtgagggtggagccctcatggatggggttagtgccattataaaagaggccccagagagctgccttgccctctttctaccatgtgaggacagagtgagaaggatccatctataaatcagaaacagggccctccacagatayaggtactgcctgtgtcatcttcttggacttcctggtatctagaactgtgagaaataaattcctgttctttgtaagccactcagtctatggtatttttttatagccacccaaatagactaagacaactataaaaatacagaaggcagaacaaatcactactgaggctgtgttctatgggaaaagaatgaaaaaggctggaatagtcatggttttgggttgtagtattttttttttttttttttgagatggagtatcactctgttgtccaggctagagtgcagtgatgcaatctcggctcactgcaagctccacctcctgggttcacgccattctcctgcctcagcctcccaagtagctgggactataggcactcaccaccacccctggctaattttttgtatttttagcaggggtggggtttcactgtgttagccaggatggtttcaatctcctgacctcgtgatccacccgccttggcytcccaaagtgctgggattacaggcgtgagccaccgtgccctgctgttgtattttaaaagctgttacaagaaagagatgagctcaggcaagacttgattggttggagcacatgaaagggaatagagccagaaaccagaaatttgtggtctcacagggttagaagggccaacttctagaacccaaacaggaagaaataagactgaaaaagattctagagatgaaggcccaatacaaatgttcaattaaacaaagagattcaggccaagggaaagtccagagtagaaatgtttacttcctacgtaggtcgatatctttagatgctctcagggcagctgccttcaaaggtacctctcatcaagatgggtgtggagggaatggatcctgtgagcagtagggctgcctgtcttcaaattcactgtgtaaacctggatgacaaagagtgccaaggaggtgtgtcaggctagagaccagaggctcttcctctattggattgcaggaaccccctgaagactcttcaacaaaccgagagctggggtgagcccccaccaasacaggagggagattaaatttccctctaatctgggtgtatatgaggagtctgagacagatgaatttgatttgccaaaaatggagagagaaggctgggcgtggtrgctcatacctgtaattccagcactttgggaggccaaggtgggtggtttctctgaggtcaggggttcgagactagcctggccaacacggtgaaaccccatctctactamagatacaaaatgagtcgggcgtggtggcgcatgcctgtactytcagctgcttgggaggctgargcaggagtatcacttgaacctgggaggcagaggttgcagtgagacgagatcgcaccactgcactccagcctgggcaataagaacaaaactccgtctcaaaaaaaaaaaaaaaaaaaraaagaaagaaagaaaaaggaaagcgagagagaagcacagtgctccttacgccccagggccatgggacttgctcgtatctgcagttaacacaggaacaagcacggtaccagaattccccatcatccagagcagtgtgacacagacgyttctgctcagctggaccaacagaacgccactccggagaactaggagtaaacaaaattggtgttcaggcagaggtcatgatgaagagcaacaatggccttgatgtggaacccacagtgtgcggttatggaggaaataagacctgcttagtaactactcactgggtcccaaaaatgcacccagggatgtagcggcaggtgagccactggcccccaaataagagggctggtcagaaagtacatctccaagtgttgctgatggataaaatacccctgaggatgatctgaaccaccgacatggaagattatcttgggatagtcacaaggcattgcatgcccgtggggtagcagaagagcccggctggaagccacaagtctgctgactttcgtgcttggcctccaacttgccatgtgacctggagcagtacttggcccttccttaatggacaagctgacacttggaaaggtgataatgccttacacctgcccatgcttgatgttgtctgtacccggcaccttttgtatgtgacctcgctggcaagccaggtggggttctgtgagctaggtgtgcccgtcctgcagataagagggctcaggtaggcccatggaaacactctcagggaagagtaggggtaggaatggctgcctgtcactctccaaactcaggatttgtgactccaagttcattgcattttctgtgactcccacagccgcctccaaatagttcaaagtaggtcaccactgttgcggtgctacagccaacgtggcagctccctctcatcctgtgatctcaactcaacctcaggggagtgctcaggtgatccaaggggaggatcagccgggacctgtctccaggtgctcgggccagggtcagaagagtggaactggcagccattattttcttttggagccattatcctaagtggctcacacccagataattggcctgacaggctggccatgcggtgccttcaaccctactcacatgtcaccagcagcacagcraagtcagggartcgggayggcgcctgcccctcccatcacccatggaggctgcatgagtggaagacaaattttattccagccttggctctcagtcmctttcttgatttctacctctgtgagtcccagaaaatgggagacaatggcccattttccctttataggctacgatctcaaagttgaggggcactgcacatcttacaacgtgacgcagtctcactaattttggtttcagtagttctctgtgctttccatttctgccaggagagggaggccaatctctttcctcctcaacccatctcagctcatctctgccaatgcttcttggttctcagaaggcggcagccaaggccagagcagaggatggtgggacgagagcctccatggggacmatgacagcctggaaagcacaggcctgtgtgccctgccctcacgctggggtctggctaatacagcagcggctgcaccatgtctggygacctggtagctgtgtctggactgaagacaaacactggctcagttttaaccaagttctagactagcttcagatttccccagaagctcaggggccatggatgtggcaggaaagggcttcaggagcccaacaagcagcggacgagcaacagcytcaggcaggccctgccacgcacccacacaaacatccctggttcttagtcacctggtccacttcccaagggaccagagctggaggagctgtggggacacacacagaaaaggcagacctttcttgataactgggggccaaaactctggttaacagctctgtaatagataaaattccaattccatgtcctctattttttttcctttaaaaaaaaaaaaaaaaagagatggggtcaacatgctctgttgcccaggctggaatgcagtggtgcaatcatagctccctgcagcctcaatctctcatactcaagtgatcctcccacctcggcttgctgacgtgttggaattataggcatgagccaccatgctcagcctcacttctatttctctgctgggctattgggcctctgccatggtcagtgaccatcagagagaatcctatagttacatgctaggtaatatttcagggattccgacactccaaatacacacacacacacaaacacacacgcayttatgcatatgcacactgcttactggagttactcacaactacagataaagcttttcaccatatcactgggttataaacatcaccatgggaggtaacacatttatgtattgacataaatacaattcgtgaaagttagagtgctgttgtaaaagtctttcttgagaatcaacctkgatgcaaggtgggcctgagggctgaaaggggaggaagaaggggcacctcagaatcgggacaggatcctgagtcagagcccgggaggatagtagacaggccactccttcacatgtctgcacaagccagctctggccccacacgccccgggaaccagccagagaggcaggatagggtgactgacctgtcgctccacgacccgttccactcaacctggccccaagggttccggattcggatgagctcgattctctggcctcggaagcttacctagaagggaaaagcatgagggaagtgtgaaatgataaatatggtggaggtttggccacattcatctatgagctccaggtggaccagctccatccagaactggttctgttgaaagtctcttgcctaaaatgctgctgaaggtatgtagaagttcgccagttcttaaccagcccttggaaccttctaattcctattgaataattgctactattgccaatgatattatattaagcaccaaaatgcttatgccacatctgggaagtaaagtagaattgcaattaacaagaaattagtccatatgaatctaaaaatgggtttctctctagacttggatctccctagaggcaggagccaagtcttaggcatcttcagcatctagcagartgaatggtaaagagtagtcctcaaaggtgctcatggaactattactgaactttcttcatcctagcatcccatgcacagatgaatgataagaaaataagcacatgttggggatttaaacacaacaataaacaaaaacagcttttaygtcttctagacccaatattctccttatttcaggtgtctgtgaggattcctgctgttcacctcaatcacccttgagcctgtgtgccctcaggctctgcctgggagcagggacaagggccaatgcatttgagaagggttttrgaggagagagrgtgaaagtaaaagacttctagttatyractaaccagaaactgtagcagtcagaatgttttatcctcatgcatttggcataaattatattttggatgtgtaaaaattcaagtaacatcaactcttcrgagtccaagatgtggcttgtggctcaccattaaaggggctcatttaatttgaaaggttcagggcaggtgagttccttgtaggggggagaggaagcaaaatcaagcaaaccaagatgatgagaggtttctgttgttacgtggaatacgtagaagatctaacctagaaacatcacatgccygcttgagtgagcaatctgcaagtcatctatggatggtgaaggaggacaaaggagccaacacaaatagctaacattctaaagaatcccaaagagtccaayggcgtctcacaccttggctccagtgaggaggaagggcagrgtctcccttcagtgttctttactccccacgcattcagaggatgtcactcaaaaggtgggtggctacagaagaccaggtgcatctgcaccttctaagtactgggcttgagactggtccagggaggcatggagtgggcaaggcaggctgctgggctttgctgagcttgagtctggcagagtgatacctttggcttcttgtcctcctctttcattcaattctttcttwctcttccccttgtgcccctcaaggatctctcctcctaaccaacagctcccttgaagtcagggtggtgctgtgtggagtctgggtgtcccccaggatcagttccaccctgggctacagctacaagaatgggactcgtggtgattaattttatgtgtcaacttgactgggccatggggtgcccagatatttgctttaaggttattctggttgtgtctgcaagggtgcttctgggtgacatgaaatttaagttgattgagtaaaacagattgccctccccagtgtaggtgggcctcatctcatctgtgaagacctgaccwgaacaaaaaggcagaggaagggggaattcactctctcttcctgggtgcctgagctgggacatccgtctctcctgccctcagactgggacttttaccattggtgttcctggtggctaggccttcctttcagactcagaccagaactacaccactggctttcttgggcctccagtttgcagagagcagatcgtgggacttcttactcttcacaattgcatgagccaatgccttacaataaatcgtattacaggtgatcctggaacaatgtcaggggttggggtgccaaccctcctgcattgtcaaaaaatcttgtattccctaaagctgaactccgaatagcctaccattgaccagaagtcttatcgataacrtaaagaaccaattaacatgttttataattatttatattatatactgtattcttacaataaataagccagagaaaagaaatgttatcaagaaaatcatagggaagaggaaatacatttactatttattaagtggaactgggtmattgtaaaggtcttcatccttattatcttcaygttgagtaggctgagaaggaggaggaggagttggtcttgctgtctcaggggtggtagagatggaagaaaatccccatataagttcaagcctgtgttgctcaagggtcaactgtrtgatgtagatagatagatagatagatagatagatagatagatagatagatagatagatagatagataggtgtgtgtgtgtttaattgtatgtatatatatttggttccctagtgattctatttctctgaagaatcctgactaacacaggactgaaggagaattgggaaagaaaggaaattaaaaataaacaaagaccaggcgcttacagctgctaaacgagttttgtgctgcggtggaatcacatggtttctctctttcctggcttgccgttttgaattccagcctgcctctttaggtgacataatctctgaaatgcctgaaaggcagacatttaaactgcaatgcactgaataaatgcctaagggattagcattgtcacatgtctccccatagcctgcagttggagttcaagtcgcctacctggtcaattcccgttacactgtaggcatgacccttaataagaccaaacggcgtccgggcctcagattctgcagyacttctggtctaaaacatggraaragcagmgtcacacccaccgtctaagtcaagcctcccctgctggatcagacccagctacatgcctggcccrgtcacaacctccagccccttctgctgccccaggtgcaggccatgtgcgtgggctatgcacggggctcccctaggatgtttagcagtgacatgaagcaagttccagtctcttcccaggatggggaggcgctcgcttccagtgtggactccaaagaacagttcactattttgtccccaaacagaacaacttgtcaccttcatgtagtatagtgtgagagagaagacacaatcacatacatcccagagacgaaaagaagaatataacaacaggacacacagctctgcgtcacaaacctgaaagtgcagaggaactggctaattcattagcaraaaacagaccccaaggctaatctaagaggaaacagaaaactagaattgattaaaaaaaatacatagtgtcatagcagtccataaaaaacaacaaaaagttttaaaaagatgagataaaattataagtgtgtgtgtttgtatgcatagagaaaattttaaaaartatcattagacttctatctgctatttttttcatagtacatgaaatgaaaaaaaaaaaacaaatttcagaaaactagatagraagatcccrtttcagtaaaatcaaaccaactgaccttgatgtttgtgtgtggaagtgtgtgcctgtttgtacgagcagatagagagctgggaaggatacaggccaggtgatcccagtcccaggrtggagctggagaacagaggcagctgagaaacgggtgggagggaggtaaaaatgcgcctgtatgggcctcaagattgttccatctgatacagcaagtacatcttacctttgttatttgacgactattaaataaaaacttgtgttttatttgttatttatttattagagacagggtcttgatctgtcacccagcctggagagcagtgacacgatcatagttcactgcggcctcaaactcctgggctcaagggatcctcctrcctcagactccagacacacaccaccatgcttggttaaaacttgtgttttatttatttatttttattttattttattttattttttatttatttatttatttatttatttatttatttatttatttattatwctttaagttttagggtacatgtgcacaacgtgcaggtttgttacatatgtatacctgtgccatgttggtgtgctgcacccattaactagtcatttagcactaggtatatctcctaatgctatccctcccacctccccccaaaacttgtgttttaattagcaggaataaacactgcccccaagagttatgcccctccttgggtgtggctggggtacctggtacagccccagcatagtgcctggaatgcactatgcagccycagcatagtgcctggaatgggagcccatgagcaacttacatcartgaagcagcccagcagggagcctctcttcaaagccttctctagaatctcatagaagttctcgggggcctctttagtttggaaggtctctgccacacccccrgtgaagtcttccatggcctcgatggcgctgcctcccttcagagcttcatagctcccatttagcctgcaagggtggcaagagagagaggagagagtcagggacctagggaggccacyrgggcaccctgctttcagagcttttctaactaagcctgaagcatctcccagggcttgccctggctgggtggtgtggaaggaagacgggaagcaagttatcagggtttgtttggagcttcgaggaagccaaagatcctgaccttcctgcaagggaggcagtgtggtgtggtggtatagagcagcagctctggtgcctgagtggccgcaggttcaaatcctggttctacracttaccatctgaatgaccaagtcgctagtgccttcattttcttatatgcaaaatgggggagagagttgtgctctcccttctaggactgctgtgaggttcaaatcgtgtgtctcactctctaacctcccatggaacggggcctggctatgtggatagagagaggccctttcccttcttctctggtctcacatactcctaaccatttttgtcatagtcatctcttttattcatatgcattttacatatatgtgctctgcttgatttttaaataagcttttcaatttagaattttagaatctggtgggaggtgactgaattatggaggcgggtctttcctgcactgttcttgtgatagtgaatgagtctcatcagatctgatggttttaaaaatgggaatttccctgcccaagccctctttgcctgccaccatccatgtaagatgtgacttgctcctccttgtcttctgccattattgtgaatccttcccagccacgtggaactgtgagtccaattgaatgtctttcttttgtaaattgcccagtctagggtatgtttttatcagcagtgtgaaaacagacttaatacaatagcttatttgggcttctttagtttttacctaatgycctttttctgttccagaatcccacccaggaccccacactgcactgagtcctcacatatccttaggctttttgtggctgtgacagtttataagactgtccttgtttttgatgaccttgacggttttgaggagtcctgggcaggcatactgcaggattagaatttgtctaatgttttttctcctggtaagactagggctattaaagaaatgataaatgcttgaggtgataagtatctcaattaccctgatttgatcatcgcacattgtgcgcttgtaatcagaatatcaaatgtgccccatcaatatgtatactattatgcactattatgcatccataaaaataaaaaatgaaacattttttaaaaattaaaaaaatagctgggtgtggtggttggtgcctgtaatcccagcatttcgggaggctgaggcaggagaatcacttgagcccaggagttgcaggctgcagtgagctattacggtgccactgcactctagtctgggtgagagagcaagaccctgtctccaaaaaaaagtaaataataataaaaaaaagagtggggctattggttagtggaaggaagaccggagaggtaaagctsccctctcatctcatsatatcaagagtacctgccrtccacatgccttaccacagctgatgctggccttgatcacctrgctaaggtagtgttagtcaggtgtctccactggaaagttgctccttctctcccctttccatgctgaactctttggaaggaatcattatgtgaaggccgcatgaaaaaatcagggagttatactccacctcctcaaggatggaatataaacataatttatttggaattattctacacaggatatatgttccttcttccacatttatttatacaatcatttattcaaattagtatgaacccattgatatttattttctacttgggtttattttgtgtttttttgttttgttttgtttttgtttttgagatggagtcttgctctgttgcccaggctggagtgcagtggcatgatctcggcttactgcaacctcyacctcctgggttcaagtggttctgctgccttagcctccygagtagttgggattacaagcatgcaccaccatgcctggctaatttgtgtatttttagtagagactgagtttcatcatgttggccaggctggtctcgaactcctgacctcaggtratccacctacttcggcctcccaaagtgctgggattacaggtgtgagtcactgcacccagcttctacttgggttcataatccagtastgctttgtctatttcgttggttgaattcttctagctttggctgtttggagctccttcagtatgctcttgtgyccttttggcataacctcatttgtgtgtgtgtgtgtgtgtgtgtgtgtgtgtgtgtgtgtgtgtgtgtcttgcatgtgttctcattttctggcactataagatgatctaggttcattttatgtatgtatgtatatatgtatgtgtatatatatgtatgtatgtgtgtatgccccagtcctagaatcagccttatctccaagaagccccasttcctttgattgaagaatgatcttagaaaccaagacttgagacataggtgtgcttgttgcyacaggattgtcattgcttctagttcctctcactgacaaagcaaggaaatacatatgtgtatgataacccaagtatagatcaatatatatgtgtatgataacccatgtacagatccatgtatctctacataaccatctctgttaagctaaatctaagttcattctggaatctccaactctaatctgcatggatcattctggcctcctccccttgcctatctgtaacctctcaatccaacagtgagaaactcggctcccgccatccaccatccgttcactcgattgttcagctcaatatacatgtataattagatcaatttttcatttgtactcctwcaagaaacaattttagcaactagagcatagcactcacgtacagtttcttttgcctttaatcttacagactccactgatttccaaagttacttaggtcagcacctttctctccaaccccwtcaatgaggttatttcatacgtttgaaattggctctcatagttacggacgccaagaaatctcacaatctgccatttgcaaactggagaaccaggaaagytggtggtatcattcagtttgagtccaaaggcctgagaattggggggttgatgatgtaagtccaagtttgagtccaaaggtttgagaacgaggagctccaatgtccaagagcaggggaatatggatgtcccagttcaagtagggaaagggaattcacccttcctttgtcrttttcttttatttggatctttagcaaactgaataatgctcgtccacattggtggcagcaatcctctttactcagtctactgattcaaaagctattttctccagaaacactctcacagacacacccagaaataatgcttcaccagctatctgggcatcccttggcccaatcaagttgacacataaaactaaccataacaccatctatacagtttttttttggtgagctgttctgccaaccatttttggcctttttaartgaccccaataaatcttttttatgtttagaaactagatggcacacagttkctgttgccttgcttgcatcctgatgtggggggcactcaccaaggggcagaggtgggcttgggtcccacccactggacttggaaacagtgccctttgtccccttaagcctgtctggtggcactgatggtgtttgcacagacctgggtgggacagagggcaagcgtgggcatctttggttcttatttgatggctttaattctgtcctgctgatttcaggattaatttaaccacagtatgmctcccctctattttgccacttttatgtcccacttggaggtagaagcaagaccatccttgcttctgtctctggggatagtattctcatggcttgaagatccaggctgaacctgaaagtggctcccaggagctctgccatcatctgtggatcaaattcaggctgttgtggcctttcactaacgagctagtgggctggaaattgagagcctgaggaaactgaggccatttggctggtgattaaaaatgaatttcttggttccacttatatgaggttcctagactagataaatcataaaaacagaaagtagagtggtgttgccaggggctgggggaagggaggaataggaagttatttgttaatagggacagaatttcagttttgcaagatgaaaaagtgctggagatagatcgtggtgatagctgcacaacaacatggatgtacttaatgctactcaactgmacacttaaaaatggtaaaatttatgtcatatacattttatcatatacgattatttatcgatatgtcatatacgaytttttaaaaataaaaaagaagcatcccgtaggacggacaattgatgtctctatatcmacgtgcgtaatagcccagatgtttgagccatgccagtgtccgagggaagtgtgaagcactaagtgctgtcggcacagccagaattcccctccgcttgccttcccagctcttccaaaggccagattcatggcccagggagaaaaagggtcatgaatgtagcsactgctcccaaagatgggcacatctaggctacgacaggaaaaccacctccaaccccgcttgagccctgagagggttgggtcctgccgagcctcacctgcaaacccagagccctgattttttcccagccyttagatgctcactacaaagactagtrtagagactcctgtcgggaggctgcytgagctggggaagctgtcactcacttggcgtaggctttttccagcaaggcgctccagaactcrttgtggtcggcagagtggaggaaaaccaagcggtccctgaaggtgggcaggcggtcatcgatcaccacgtccagccactcactgtgctgccagaactgttgcccaggaaaaagacagaaatgatgygagtcagctacatgggagctccaggccctgtttgtaaatgttgatcctgttgcttttttcccctctgaccaagctacccatagacagctttgaaaatcacacacgggttccaaggtagggcacctgggctttgtccwccaagttacaagctgagtattccacccagcactaaccattgacatcagctgaaagactcagggtcaacccatcaaagccgcaggcgatgcagggggcaggacaggactcacaagtagacactctacggtgctctgaattagtttttcttcttcacaagaaagttgtttttgtgggggagggagaatggtaacgtggggtttgggtttgctgttttgtagcccagttctctgttattctctcccatccagtttcagggtctagctccaattttccttaaccttgctccctcctcgcccataagtggagcccctaagactgatttgttggccattcacayaggaggcaggtggactcagtaatccctgcgtgccagtgaggagacatgagtggagtgtgggtgtgtgtgaatgcatgtgcgcacacatgtgtatacatgtgcatacaggcaggcatgacaggtatgtgcactgtttgtggtttatttatacattgcatgtgtgaaagcrtgtgtttgctcacatgtgtgcaygtgtgtgcatgtatgtgtgcaygcatgtgtttgcaagtgcttctacacacgtgtgtgtttgagcacatgtatgcatgtgtatgagcttgtgtgtggtctgctgggaacaggaagggaggttggaacgagtcaaggaccatggtagtttctctgtgtatcctgcagtgacccacctcctacccgttccttctggttcagttggcctgagagcgatcctaaggtaacctctaagagtaaraagaaaagggttgaaagaggagggtaggcacagtggttttgggagccatttatttacagctttgctgtgtcatcctgagcatcttgctgcatcagtgattcaatcccaatcagaagagttggccacgatgtggctgagggtgtctgtgtgtgtgtgtgtgttttaaggaagattcttgtcacctgctscwgctggacctcccctccagggcttcccgcttttggggctatccacagcttcaggtgggactgaggcacagttgggttaggtgtttaaagttcgggcctgggccttggggttcctgagcaggggagcagtggggaggagcctcagggctggctttccttgcagaggggctggctcagggggcctgtgagtcaggagagattatctgccagcccagagagctctgctaacttcctagcacgcacacctgcactgtggctgaggagtggaagaggagtgtgaaggaggtggatttatttccaaagctctgcttcctagaaggccaaggaggggagcgggcggagtattgttattgcgggactgacaggcatcaacagggtcactccccacccccacatgatccctggcagcacaaaaggatgctggatccagaactcctgagttctaggtctggcttggctacttattgttttgtgaccctggatcaaccacttccactccctgggactcagtgtcctcgggagttaatgagaggactgggtcaggggattgccaaggctcctcccagctgtgacattcaagggacaagaacactgttccttttgggagcccaagaggtggtggttctggttctggtttagaggcagtagttctgctggttctggttctggtttagaggcagtagttctgctggattttctgagcttaaccacccccaacactgccaccctggtgtgtttaagaggactggggaaagaccggctcctgggggcgccatcaaaccaagactgtggtctcagcagaagtcacaggatgggaagggagacagccaggtggtggcaggtctgtgagagagcaggggtagagtttccctgggacccaaagtggctctgtccccagccggcgcaggaggcctgacccctgggaattgcatgctccctgagctacatgtgacctgctcactctctttgcctttgaaacacttctgtgctattggtgacagggcttgagagtacctctgcttatcagattgcagryytcagggacagaagaaacgggctggccctgagtggtggcctgtgagtcaggagaaggtgacactgtctggggtggaaggtcaaggaatgcctactcggtgcctggctctgtgccrgctcctgtgtgtgatgccatttagctctacrggaagcctgcagggaactgtcagtctctccttttttcagacgagtgtagaaaggtttaatgtcactaagaaaattgtctgaggtcacccacctaagtaagaacaaggggcaagtttcagtatctggtcgaaccctatataaggacaggggtggaggagagactggagggatagaaagtgaggtgaagcagcaggaaaccatctcctgggggcaagcctctcctgatgtgcacctcggctgagggtctgcgggtcacacgggactccagcagatgttgtctgtatttttctcagtttttattttttaaaatccctcaagatctccaaatttacaattcttccataaagagaacctctctgtttatgagaaatcaaccagtttcctggaggtataattggtttagtcaatttgtgcttaaagcacaagaaattccaaataataaaacccttaacagatggacctccagattkgccaaaacatcacttatagttttaaatgtatgctccataaggattcaccgtgcaatgccgttaatgttcttctgaggcatttagctgttattccatgataaaatgtggctttagcatggtttaggaccatatgtcacacagatctgatgacatttttttctagggttaccaggcagtgtggaaatgcacctgccctcatgcygggccccagagaggtaaacccactggcycagggctccctcttacctggaaatggaatatcccggcataaccagggccaaakctttggtcctgggggatgactctggccagtgctttttgattaagcgtaagggaggcgatgrcggctaatagccagcagtctcctgcaaaatggaagccataaatcacaattttcattgctatttcacagcaaataggaaaactctgtgtcagaaggggatgtggggagtttcagatgtggccacatcttttctacctgtttaaaaacagacaggacaccaacaaataactctctcctccccttctgcctcccttgcctgctcttctctgcccgtctatcataaacagctgttgccttcttggcactgttataggacatgcttacttgggtttcagacatatggctgcctgatgcatcagctctgtraattccagcaactccctttccagaggwccaagwctgcatacatcagtgtcagcaygggctgggcgagcagacatttcatagctgccacccaagtggttcggcagtacttgggagggtggttagaaatctccctgcagccccaaccyagacwcagcttaattacagataatggtatctccgtggtggctccatttgctttaaattatcttgcattttcaagatttattgactgacctactgaacttcccagctgtgtcttcatgttaacacacatctggaggaaaactaaaaagtgaagtcaaacatcaaacatgattttatctgtgctatctgtgctgttccagactcctggaggcattcctttgcccacactgagtgtgggctgtgtctggtgtgtgcctcacagtgtctcagatgccgcctgtgtaagcagatatctgggaggatccatttatccgaatcacctttatccagattcacttgttttcagtagacaacatcaacgtcatcagaacmtaaragcccatcacactcagcttggcagtttctgagttcacatttctggaaagcaccgtatgtcactgggcttgggacattgtaatatggccytttctggctgtttgacacaggcaagagagactcgccagggcygaacatcgggaaagctaattccgaatcgccctggttctggctttctgagaggtgtcaccagcagagtacaagccacccccagccttagctggagcacagaaggattggtttctaatgcatctgctggtctttgggagcctcaggtcagctttgggagatgctactaggaagtgacatggctggaacctgcaggatcgtttgttcagcaaactttaccaagtgcctctagggtggcagaccttgtgccacgcagaagatgcaaagataaggagagacttggtgtctgctttcagcttcagggcggccaggccaacaggagtctaatagagtgacctctgctgtgggctgacctttcccagctctcctccaagtttcaactttgcccagttgaggaaaatgagtgttttccggcctgagaactcaacacctcacgtgttttcagccagaaatgctctgagcttttggcggggagattgagaagccaaaacaagattgcttttctctctcttgggcctgggcagatggatggggctggccacccagctgtgcctggaagaagtgccctctgtgggtcagcgtgttgctcggctatctgggtggtgcagagcagagggcactatgggaggagcaggctggagtgaagtggcaccatctcggctcactgcagggggaacrctgtgcctcttgggttctcwgggaccccatactgcagtcrctcttgatccagcaatccaayctccctctcgccatgctccatcccctcacactcacccagctccacccctacccccaccccctgcagataacagcatgccttgatgctgttccaagtgtgttctagttttttttttttttttgatagagatgtggtcttgctatgttgcccaggctagtctaaaactcctgggctcaagagatcttcccacctccccctcccaaagcgctgygattacaggtgtgagcactctacatgaccagatgttctagttcttattgtgggtggcaacagatcacggctgttcattttcttgttattctttataacatatatatgccatgtacagtactttggtgtagtaaaagtgttacaaaataatctttagaatcaaccatccactaaggtaaaatataaggttgtaactccaaatatatgtttatgccaatgtgacaaaccaaaactttgaaaaacaaaggagccagtagaatgatttcctattggatagcaatggaggactacggggtcgaggggaagggaggcagaggaagagggggasaggtgggcagcggcagggaggatctcctggagaaggaccacctgaatgtaaaccttttgaaaagtctacattgtatctagaatatggcatacatgggggattggttccaggacccctgtgtataccaaaatctgtgcatactcaagtcccacagtaagccctgtggaatctgcctataccaagtcagccctctgtatatgcgggtttcaaatcctggaatagtatattttctccyttccttccttccttccttccttccttccttccttccttccttccttccttccttccatcctccctccctyccttcctccctctctcccttccttctttccttcctttttttcctttttgtttgtttgagacagtgtcttactctgttgtccaggctggagtgcagtggcatgatctcagctcactgcagcctcaacttcccaggctcaagcaatcctcccatctcagcctaccaagtagctggaactatggtcatgcaccaccaagcctggctaatttttcaattttaatttttagtagaggcgagccctcactatgttgcccagactggtcttgaactcctcggctcaagcgattctcctgcctcggcctcccaaagtgctgggattacaagtgtgagccatcacgctcagcctggaacacggtattttctgtctgtgtttggttgaaaaaaaatccacttagaagtggtcctgcactgttcaaactcatgttgttaaagggtcaactgtaattccgtctatcatccatcatctatctatacccatccatccatgtatttacccacctaccttcctatcattatttactaccatctatctattattatatatttattttgtatggtctatcagtcaatcaatcaacctatcaacctatttatctatctaattatgcatccgttttctacctatcatctattacttattatctatgtttctatctatctatccatttgcttctctctctctctctctctctcaattgtctctctgtctagctaattaactaacatcagtctaggtttgtgactttggatcttgtgtttaggatagctcagttgctcagcatggaggttccagcatggcctttcttaaccaatagaccacagtgacaacctcagctagaaataagtcagggtccacacaagcttgcagtggtttgttctctaggctgatttcactggtattttttaaaagaaagtctctcgctctctcactytctctgtctttcatagatagaacaaaggtaaacccagcccagttggattaagtcctaaaatgcaggacccaatttgagtgacttgaggtgcactcaggttcattgcaggagggagactggattgctggggagcggctccccagggtgtgtataatggttagcagtaagggctctgctgctggagtgtctgggttcaaatcctgattgcctgtctaccacctctgtgaccttggacaagttacttagccttcctcagcctccatttcctcatctgtgacgttaggagggtgggttgtgaagatggaatgaggcaatgtgtgctggggagagtacctcgcaggtgactgagttcatgtgtgcaggtgttagctactgtggtggtgtaggagagccygaccaacgctgctgggtgtcactttcctctgtaaactccggggctgtgagccccacatcacaggcatgtctgactctagaggaacrgaggtgcaggggcttgaggccactggactccattcagagggagtgaggaagcagaggccraagcagtgttgttcccccagccccrtgcctcttgggtcctcagggaccccatgctgcagttgcttgcctgtcccagtgactcaacctccctytygccatgctccatccacttacactcacccagctctccctggcagatatcagtcctggtggcccctccaagaatgaattctgggtttttcacgatttcctggaggaatgagagtgttattaggctgaggcctgccatgctgcaagccactatgaaagggtaggctcagggtctctctgctttcttggggcagagggctttccctgtgcttgattcttttccctgaggagggccacgtggatgtaaaaggctgccacctctctatgctctggataaggctgggctcatctttggtaaatctcctccgccggggagaggtcctgcctcctgagctgcactcagcaccaatctctggccagaaacacaggccacacccggccacaaagytggacatcagccacacactgaggattcctgtgctcactcaggcactgggctaggagtccagggctatcccagctgtgagctctgtgacctctgtgggcttcaaggagctgagtaatgcatgtaccacaggctggggccttggactaaacatactccctacccacccakcttctccatttctttctttatataatccttcccccacaaagtggattccaaatatatataggtttagagacagaatcttgctgtgtcacccaggctggagtgcagtgacatgatcatagctcactacagccttgaccttctgggctcaagcaatcctyccacctcagcctcccaagtaactgggactacagacgtgagtcaccacgcccagccactttttaatttttttttttttttttgkggagatgggggtctcgctatgttgcccaggctggtctcaaactcctggcctcaagtgatcctcccgccttggattcccaaggtattgaggttacagacacatgccaccctgctcagtgtttctttttacagagatgcrcttaggtaaaatttcatgtatctataccatataaagagagatatgcacacatctctcatattgtttcaccgaagtgcattatatatatatattattctatattacacataagcacatacactatgtgtattaatgtaatcattaatacatattaatatatacatatacaatatggaggggtatttataaaacatgaacaaaaaagtgtagaaagcaatcttatgatatgcatatattcttccactctttgagttgctgggctccattcctgacattggacgacaacaaagagagagggaaagcccctgccctggtggagctgccctggacgcggagggcggtgctctcggaagccccgccccttcccagcctcctgccccgcccctcccccagcctgcctcagccctggcctcacccacggcgcccactgtgcctgcagctgccaccacctcccagaagctgttgtttcgttcaggagagttttgcaaattgcatttgaggaagagacaaaccataaaccaggagagaaaagagcgaggatggagagggaaggggtgggatggggcaaggstagctacagcagtcagcaggggaggcgtctctgggggaagcagaggagcacagacctaaacaaagggagggagggagggagggagggagraagccgggccggtcycgggagaggtaacagccaawcctgtggcagcgaggcmcgttctggctcaccctgcaggggtggtgagttaactgggccggggcctgcagaggagtgaaggatttttcccacctcttcccactyttccaggcaccaggactgaggaggggcctgggctggaggtggaaggttccagcagtgtctgggcggacgccaygtggggagctcaagctgcgccgccttccccgagagacctctgctttgaattgtcttcctcaggcttctcagcaccctgcttctcctctcatcttgtgtcccaaagaatcaaaggcaggacagagatttctttgaagtcaaggggattatcaggaccaagagcagaagcttcaaatgctggtgctctctctgcattccccaggatgtgacaacctggaggagtgacagacaccaggggcgcctgcccagggagagctatgtgtggcattagtgtctaaaatactcaagaaagcttggccaggagaattkctgaagaacacggggtgtttttagatgcgccaaaaccccaggcccggcagaagtaaggacctcccaaatgctggcctgtcctctgccaggtctcacacgtctttgcattcccacccccagctccaggtagctttggcgccatttcattaaatgactctgatctccgtggtggctggaaagggagtgaaggtggggggcagctgctcagttctggggtcctggcttggcttgcctgtgcggacccctctcatctgtaggaagcrcactgctcttcttcctcctccaccttggctagcgcaggagtttgcaggtggctctgagctgagcccagaaggacaatgcaaaccaggaccatgtcagtgggcctcaatagagtcccaggaatagcctgcccsgctcagcagtagggttcagsgtgggccatttaacttctcacggctgcatcctcatctgtcaccagcttagacattctgggcttgytgcagaatgtgcctgcccgaagggaaacccaggagtcccccaagccctccctgtcttgattgcccagcccctgccaggggatagccmtggcaagcaatgcccccactgccaatgctactcactcctcaagtggacataaaatgtactccaaaagccacagawccctgcccagcaggctgtgctagctcctggggcagggctgttcccggatgcccgcctccttcccatcctccctgcccctcccctcccccagccttctgcaggcctggccccgccaaccgtaccaactgtgcctgcagctgccaccgcctcccagctcctatcttgcaattggttgttttgttcaggagaggtctgtttttgtttttgttttaaaccaratcgcacccaatgaggagaaaaatacaaaaggaaaaaactcagaaactctccaagtaaacacaaattagccatcgggtataaattggggaggtgtctggatgtgtgaccgactcctctgtgggtcagtgyttctggkaattggtgtgcacacgtgccagtcacagggggttctgcggacgcatgtgtggaaggggcagctaggcggtgggcctgggttagatgcctgggagtggtgtgtatgctgacggcccacatgcccacatgtgcaaggtgcctgtgacttgccttgttgtrtgtgcccaggtgtggtacacgtgtgtgcttgtgcatgctccacatgtatgctggttgcatgtgcacttgggagcattgtctacgtgtgagtgtcctgcatgtgcgtgtcgatcctggatgtacatttgttcctgtgaaatgttgcttgggaggccatgaggaaggggttacctgaagctacastcctgtgataggacgatcagaggtgtctcaattgcaggggtcttgacaaacctgaagtgaacctagactgctgcctgaagccccgagggaggcacgcagacccctccccctccccctcccctcccccaccccacagccctaccaccaggtggttttcctggagcactaagggccaagcaccctggaatgtttgctttcagggactgttctgtttaccttgtacatcatcggggctcagccgaagacacactttcctctactaagcacagtgaataattcacaaagggaaaagccacccttctttctttctctttctttctttctttctttctttctttctttctttctttctttctttctttctttctttgtttctttcttctttctttctttctcttcttcctttctttttttctatctttctttctctttctctccttccttccttctttccttccttcctcccttcctcccttcccttccttccctttccctctctctcttcctctccttctctctttttctctttctttctctctttctttttcattcattctgtctttcacatggccttccagtgaagaaaagccacatttccagcaaggtctggagatgccagacgctgctgttcatagctatgtgccgatccctgtcatgtgcccagcactgtggaggccatggggcctttggggctgtcccagaacaactgacaacccctcctgggggtcaggggagcagcacagggaacggcaagctcaccgtgcaggagaggctgtggtcacatgccacgctgtgcacaggtctgccacaggggttgttcacatgggctagaggggtgtgggcactttcggggaggtgtcctggatttacactgagaattggtgggggggaattgcctggccaaaaataaatgggtacaggcagacaaggagggatggactgcatggtggctgttccccatcaggctgggagacctcacccgatactccctcctcctctttctgtgcacccacttccactcaggtccacagtcccttgcatgagacctgggggtgatctcaccttctctccaggttgagcctatcaccctctctgcctcccagcccctcccagccagttccctgagtcaccctcagtgcactccttgccctgggctcccttgagggcaagcctggctgtccactgccctccaatgtccccttggctttgtgctctgcccmccctccccaagyacagctgtgtttgacaagaaggtggtgctgaggaggagggccgtccagccccacggtcccacgggctgctgagaygtgcaccgtgtaatgctgagtccyactgcaaatgatgcccaagccacagaggtctgcagggaacctggcaatgcttgtgatttccctatggcccgctaccccccggctccctgcgactctatgctgcaaraagagtctccatgctcatcctcagcccttttgttcctgattttacagaaatctgtaagatatgatgtaaagctyctaactcccctaaataagaaacagataggggtacgrgaatgaggaccagaccaaagggacaatcttcagttgcagacaaaggaaaaggcagaacagattctgaaaatgagtctgtgggaacgacagcaacacagtagacctgggttaagatcaataaagggtctgccgtaggtggagacagtgggatgaagaagggacagagggctggtacaggggcatgggctgggtggcaggtcggggtgcatcttggcaggggcttgtgtgtatcaagggccctggcctgtggatgaaggcctcacccagcgtttggggcaatgccagaggagataatactaaggaagacagccccttggagcagagatctgggactctagagtcgctgggsaggccttggtggccctggtcccaggagggragacttctgaagggggagacaaagatgccctccatgctggtttgtgcgtccagcttttatctyggagaattctaactttgacaaaaagtaagtgagttgtagagtacagattacactttaaactagatgatgtcaatatagactgcaaggatgggggccctcctagagtcaggagacgatggtgttaggttacaatgacagcagtagaaataacaaggaccagcactgattctttacacaccaggctctttgctaagtgctctactcatggtaacgcagctgaccctcatgaggaccccataagttgcattattgtccccattttaaggaagagaaaaagtgcttccaaccttttcatatcaagtgcctgtagagamcatgagcatytgtatgaaaccctggatcaaacagaaagagccgctgcttctggccaggggctctgctcaccaggggcccaggaaatcaatttctctaactctatttcccagggctcctgacatcaactgcagggaaatctctgcccacagttaaaaatgcacccacagcctgcagcctgggcagctgcccacgcgcccatttgttcatgcgccgaggccggaaataagcccagggagacctaatggtcgtgggcggtgcccctcagagggtcactcttttatgtcttgtaacttctgcttttttagtttggaaatgtcctttttcttacttagcagagcatgacctactaatcctgtctgtaaagtgcaaccccacgtgatctgccagtrccgtgacctcacactgcaattggccatatgcagagaaccaaaaacaatcacagcgtggcttcggtgaggaaggtgcctgggagctttcaccccaactccgatagggccactgaatgctcactgtgatttccccatgaacatggcaccttgtgggatcaattacctggcaggtgaagatcaaagcacctgtgtgcctatgcatgcagtcacccaccccccacatacacgcctatgcatatccacacacatgtgcacacagtcacacacatgcacatacacagtcaaattcctacacacacaagtgcgtgcacacacatacaccccacactgcctactgcaggaaatagcaataaaacccttaccacttcggaaacacccacttaggttcactttggccctgcccctgaagagcccagaagttttgtgaatgtgcgttaaaaaaaattgtttttaatcatcaacattattttaatgttgggagatagtgaggaggtagttatgatgagtcctttgctactcatatgtaagatgagaytcagagctaataatcattgtaatgatgataataatagtatcagtaatagtaataatgtgacaatagctgtaatgtactggaaaccttctgtgtgctagacattggcctgcrttagccattattgttcccattttacaggtgaggagactgaggctcagggaaatgaagtgatatgactatatgcatgagacaaattgtcaggataagacrggcactcaggatctcacttgtaggaccagcatcccttgtactgcccctccttgcscaaaagcaaccggaccccacaggagccactcccaggcccgtacmcacctggagggaatggaagccagcccagctggcgccgggtcagaggtagagccctgactaatccagcaccgcaaatattgacatggcgtcccaggcacaagctagcacctcttgggacccagtgaccagctggtgcctcttgggacgacacctccagactgtcagaggtggggcactgttcaccctgatctctgggaatggggggtgcatggttctygggagaagattcctgcttcccttgtattccatctgtcacccggttgctgagaccttgctgagccaaacatccatccacactgagcaccctcagctctgggccagaagccacagaacactgtgcataacgtgatctcagtgttaccacacacagggtgggggcctgtccttgtggataaggttttgattcgtgcctatcacctgctgacaagacccactctgactccaggtcctcagcctcggtrggagtcagacagcttggagccggggagcgggtacaaccagatgccccsggtccccaccgcagagcatcccaggcctgtacattattttctgcctccaaactgcaaagctttccacggtagactgggatgatgcamctcagttgcactgagcgtagccggcccctccccagcacccctgtttccacttcctgcgggggctgctgarcctcggcctcatctrtgctccttcccctgctcrccccactcacccctggtcgtttccacacaaaggggatctgcggcctctcactgtagaacagggaggaattgctggctgggaagtctgcatcctcaaacagggtgcctctctgcaggcactcctgcctcatttgctcaaagctctggcctgaggagtgggtgatccgggcgtccttgggaaccgggtgtgcctgaggccctggggcccggtagaggtaaggcatggctgctccctggaaggctggcttgggtccggcagtggatggaaaagaaagtgaagaagcgagctgtgtgtgccggtcaagaaggaacagctcagagggccactgggctgagtggccctcacctccacctattttctgggcacctccctgttagactgagatgggacacrccctgatggaaaacagcagagagagccctctgcccactctgcactcctgcagactcagaggcagctctggggcctggcacattccactcagaggcggcacctctgcttagtgcgctcagggggcctmatgggagagagaggattgcttcagaaggaaaaggagcaagaaacccaastggtccaggaggtggctttacggagaagtgcacggtgtggycttgagtcccatctcctgcatcagagaatggcagagttttgtagtcggaagggagsttggtgaatgaaagcaggatgcattatgtgaacacagctggcacagctcctgcacaggcaatcccatagtgattcagcactggggtcagcaaaccttttctgtaaaggcccagaccatgaatattttcagctttgtgggccacgcaaagtctgtgctgcaactactcaacttwgctgttgtagtgacaaagcagccgtagatgtgacacagatgaatgggtgtggctgtgttccaataaaactttatttacaaaggcaggtgggggttagatttcatccaacctgacccctgatagaggagaactcacagaggacatcggctcttcctctagggcacatgtgcctctttcrttctctagacatcatattaataaagttccttgttgttatagtcctacaaataggatctcacgtctgagaaaaaacaaatgttagaggatggaggtggtttgataaatgtgtttgcccatagaaatgattatacaggctgggtgtggtggctcacacctgtaatcccagcactttgggaggccgaggagggttgatcacccraggtcaggagatcaagaccagtctggccaacatcrtgaaaccctgtctctactaaaaatacaaaaaattagcccggtgtggtggcggatgcttgtaatcccagctacttgggaggctgaggcaggagaatcccttgaacctgggaggtggaggttgcagtgaactgaggtcgtgccactgccctctagcctgggtgacagagagagactctgtcaaaaaaaaaaaaaaaaaaaargaaaaaagagagagagagagaaagaaaagagagagagagaaggaaagaagaaaagaaatgataaatactggaggggatagatagcctaaataccccaactcgatatcacacattctgcacatgtaacaaaatagcacatgtaccccatcaatacrtacaaatattatgtatcaataaaaataagtcaataaaagtattagtcaccacgtgaaaactctgatgttctaagcactttataatgatttctgtrtgattctctaactagtcaaagttgaggtttggagacaaggggtcttgagttaatgggtacagttaaaaggccatgatgtgaatttttatataagctcacagttcccaggagtgtgcactcagtctgacacacgttctgtctagtagatcctgcatatggttttacaggggaggtctagacattagagttggggatatttgggttttactctgctatggcctgattgcttgtattccgcaccacccccccgaccccgccaaaatttgtatgttgaacccataccctgcaaggtaatggtattagaaagtggggcctctaaggggtgattaggtcagaagagtggagccctcatgaatgggattggtgtcattatgaaagattaggtcacagagggccccctcctcccttccaccatgtgaggacacaggaaccagaaagtagaccctcaccaggcatggaatctgccagtgccttgatcttggacttccagcttccagaactgtgagcaacacatttctgttgtttataagccaccctgtctgtgctgttttgttatagaagcctgaatgaactaagacaaattcccagttttccctggggtgatcttgggcgagttatccatgctgtctgtccctgcttccaagctgtgaatcaggataatcggtgctgcctgctagaggcatggcgggtttgtggaarcaaagccacttgcaaagtctggcacatggaggggatcaggagctgctgattcctccctttcccctatcctctctgcaccccctgccmctcccacagatgctgctgaatttcatggtctccttctgagcctgacttgcctcaamttgcaaggcatctcttttgtctctttgtttgcacaatgaaggactttggaactggggtcctctggctgggaccagagtgcagttctggccagtccaaatgattcttggctagagatgatggagctgcccaggagtgtcccattgcccactgccctggcagacggctctgtttcgaagtgattaaggagggcaacctagggagacaggtgtggcaatgtgagggccatccatttctggtgacacctcggcagggaaatgattaccagcccagatctctgggagcatccccttcaaatgccccagcaactgagaaaggaccttgaagtaaatttcagcactgaccagaactgtaaagggtttgctcagcaccagacccactcccagcttcagggatttacgttctcattctcctcccgatacaaacacctctccaggctggggtcttgtccttccacctgggacttatctatgtattggaaraacctgcctttttctttagagtcttagtatagttgctaggtaattggagaattgcatcatcattgtgagtaaaacaaacatgcctcagagtaggaaacacaccaaaaaggtttaacaatcctccagaaccacagctggaattcctcctgccccctaacactctgggactctgagaatgtctgcgggagggagtgcattctcaggatttacagcctcatcattcttcctgcccaatgtctgcccacagagccctgggtccatctttcctgcagagctcatggcacyggacttctccatgactttgtcttagcgtctaatcctgctcccagctcagcccagtgcagggcaggagcacgatgcacatttgctgagtaaacattgaaccaatgcctcaagaaagcagatggcattcttgggtgtcttcatttagttttccaaaccttcacttctcaggatgaacaatagttacagaaactgcagccatgcartctaaggtctaccaggccttgcacacttcctcacccacactgggaaatgccctgagtggctcagagggaaagggctctgagcttgggcagagaatcatgtgcactgtttttaataagctctgccagcttgtcgctagcctagagatgcaatcagctttgagccaagcgggggccatgcatcatgttaagtgtattttcttctctttagcagagcaatctgctgaagtgatttctacatgaaatgaacctgacctggcatctggggccttcctggcctctcttttctgtgctgttctttctctgtctcctccacactcaggcctstggcgaactccctttgtttctcttcttcttgttcatcttgaagggcagcaggaggtgaacatagtgcctgsgtggctctgggatgccatggggcaaaaccccaaggacaaatgctcrgaagcttcacatgggtgcagggagatgacctctaggaccccacccrgtccaggccttacagcagggcctgggttttgagggatatgccaaacagcctggatcctgcagagggatctcagccctatgatgggctgagagtgagcccacccggctgcgacatttgtagccccttggcttgcagtgtggaggatggggtgggctggcgaggagggtggagagtggagaggcaggggacctgcacaggtgtccaggtgagaggggctgaggctaactccagatgtaaccagagtgaaggcaggaagggacagattcttctagaagtactgtcagggcgttctgctggggtgcaagggtggaggtgtaaaggtggcgtcctgccttcagacttgagcaaatgggtgatggtggtgacagaaggaggagaggcagacttggaagaaaagttgaacactttgggtatgttaagagtaagacgactgcgtgcaatggctcacacctgtaatcccagcactttgggaggctgagacagatgggtcacctgaagtcaggagttcaagaccagcctggccaacatggtaaaaccttgactctactaaaaatacaaaaaatgagtcaggcgtggtgggggtgcctgtaatcccagctacttgggaggctgaggcaggagaattgcttgaacccgggagtcagaggctgcagtgagccgagatcsagccacggcactccagcctgggcgaggagcgagactccatctcaaaaagaaaaagtaaaacacccccctacttgctgaagggagtgtaaattggtgtctcctttttggagaactatttatgaatacctctcagagctaccaatgcacccactctgatccagctgtttcccttctagaaatttatctttatcctgatgatagagccgcaccccgaaaagtgaaaggtataccagcttgytcatttcatggtggcattgtttacattaaaaaaggttggaaagcacttagtgccctctgttgggggaatggtraagaaaattatggtccagctaatcatgaagtggaacagtgtacagccataaaacggaacaaggaaactctgcatacactgatgtgggaaggtccctgggatacagtgttcaactgaaaagtcaaagtggccgggtgcagtggctcacgcctgtaatcccagcactttgggaggctaaggcaggcggatcatgaggtcaggagttcaagaccagccttgccaacatagtgaaaccctgtctctattagaaatacagaaaattagccaggcatagtggtgggcacctgtaatcccagctacttgggaggcagaggtaggagaattgcttgaacccgggaggtggaggttgcagtgagccgagatggtgctactgcactccagcctgggtgacagtgcgagactctgtctcaaaaagaaaaagaaaaaagaaaattcaaagtgcagaatggcatgtagagtatgccagcatttgtggagaaagaaggcaaaaaatatttatttatatctgcataaaaatttctcggaaactacacaaagatctactcataatartggttctgttttctgggggtaggtggagtagatgggggtagaggaatgtggggagacttttctatatgccttttatatttttttagctttaaccctatagatttacctggttgaattttttaaaattttattttagagtcggagtcttgctctgtcactcaggctggagtgcagtgacatgatcatagctcactgaaggcttgaactcctgggctcaagagatcctcctacctcagcctccccagtggctgggactacaggtgtacaccacaacactagccttaactgttgtcgacttttaaaagcctagtttgaaacttaaagcccacaatgatgttttggcctargtgggctctgccttccctcccccgtgtatctctcctcgcaagatgtctgtacatttgcaaaggagcttatctgtcctgagggccacccccatttcctagaagatgagaactagatcttcacccagaccttgcttccctatccatcccctcccaaggtcattggtaagcctgacatcaggtgagggtctcmctttcttcatccagggacttgtccatccctggaacactcctagtttcacccctgtcctagtgggcactcattcatgaaccataacaaatcttttcttcagtgggaatgagccgtgctcaggcatcacaccatagggtaagagccatctcctgaaaggcaacagagcacccagcccaaatctcccccacactcgctgctccacagggtgatgccagtctttggcctcagctgtctgactcaagagatcccagcttgtaggcgcataggctcgtggacgacctggtggttcccctggtttcccagggctgcacaagctgcctatagcttctctcagctctggccttgctttctggcttgattgtggaatatagtttcctccaaggcctaatctccctaagtaagctctagatcactgcccctatggcctaaggtgacaccgttgaaattgtacttccgtccctgagaagtagtttcactccttaaacattcattgttgaagaatgataaatatacctgtctgccttctgctaactctctgggatttctttccctggagtttgacctcagcccaagacgatttcctttctccttctcatctasgagctggaggttgatgctatgcacagatcttaggatgacttgaatcacaggtgcagcaggataggaatttactctccgcagtttagggcccaaaaaaatcctaatttttgagacagagtctcctctgttgccaggctagagtgcagtggtgcgatcttggctcaccgtaacccacctcccgggttcaagctattctcctgcctcagcctcccaagtagctaggactacaggcgtgtgccaccacatccagctaatttttgtatttttagtagagatggggtttcaccatgttggccaggatggtcttgatctcttgacctcatgatccactcacctcagcctcccaaagtgctgggattacaggcgtgagccaccgcatctggccaaaaatcctaattaaaaaaaatattatctcttcttgccctctggagtccccagttaccacctcgcaccaaaacttgtatttagattttgttgtgtgacactcttattcattttaaaatggtctctcttactctatctctcttcttctgtctctgtaaactagcagttacttcaaagttcaaatatcctgtaaggtttgtcagaggtgtttgagccagaatgtctccaacttgaataggggttgggtaaaataaggctgagacctcctggctgctttcccaggaggttaggcgttcttagtcacaggatgacataggaggtcggcaggtcacaaagatacaggtcacaaagaacccactgataaataaaacaagatgcagtaaagaagctgccaaaacccactaaaaccaagatggcgatgaaagtgacctctgttcgtcctcactgctcattatacactaattataatacattagcatactaaaagacactcccacctgcatcatgacagtttacaaatgccatggcaatgtcaggaagtcatcctctatagtctaaaaaggagaggaagccttgtttcagggaagcctctgcccctttcctggtaaactcatgaataatccaccctttgtttagcatatgaccaagaaataaccctaagtatactcagttgagcagcccatactgctgctctacctacggagtggcyattctttctttacgtctttataaacttgctttcgatctatagactcgtcctgaattcttycttgcgtgaggtccaagaaccctctcctggggtctggatcaggacccctttccagtaacaggtccacttttccccaaataagtgatcttcctcctccttcctccttctgatagtggcatctaggtcagggtgaatcttaccaaacctgccactggagcagggacctctggctctctgggatcttcttggttgaggtgtctctgggaaccagcttctttccttacggtatttgctgtggaggggtcacagctagcataacttgtgtttcattttcctatcgggggcaatgcaccgtaattaccccggaagctcagcctggctccaacatttcccgttaatgatgagccctccacctggtttctctgtgcttgccgaacctcagaaactcatttgctcttctcagtggtccccagctttgggctctcagctctgcagactctgccacaccatctcatgccctgctcagggcaacaccctggtggacaaggtgactcttaattcccagccaccccccgccccatagtggaaattgtgattggacatttattattattattttattttagagacactgctggagtgcagtggcatgatcatagctcactgtggcttccaactcctgggctccagccatccttctgcctcagcctcctgagcagctgggactatagtcatacccagctaattaaaaaaaaaaaaaaacctgtagaggagggagtctcagtatgttgcccacactggtcttgaactcctagcttcawatgattctcctgccttggcctcccaaagtgctggggttacagatgtgagccactgcacctggccttattatgtttaattggagggaacattgataaagtctgttacatagtagcaagagtatccctaacatgccttaccactgagaaataagattctttgctgctggaggtgtgtgaagtttttctatagcagaaggagatgtaatttttttaaaagtcctttgactacagagatttttatattgtctgtgtacaatattactgggtttattaaaataatttaatttaaaatatctcatttgatttatcacctacatctacagttgtgtatttagttatgggacatacatctaattgaattcccatctttttgtggtaaaggtttattttcagcatctctttatgcatctcatcctttcccactctccattttctctttttaatgcaccattttctgattcttataaatgacgtatcctccccctttggcaaggtagcattagccagcaagcatacctaatatttgtgtggatggaaggctcaggaagagaactatttgtctctttcgagcttatggctttcacaaagtgtcatagcaatttttatgactcaactttcaaaagagatttattagcttgggtctctaggaaaaaataatttataaggccactgacaatcatagctgtgaagacataaagtaacatgataagcacttatttttatagcactttttacatatgagactaccatggtatgaagttcaattatgatgactgatttataaacatcatttcttgtttaacgtgggtaatttttaaaagtatgaactggtgagaatgtcaaatggtgcagccaatttggaaaagtgtgacaggtcctcaaacaactagacatagagttactgtaggagccagcagtttcactcctgggtatctgtcaagagaactgaaaacagatgtccacacaaaacttattcatgaatgcttacaacagccttattcataacagccagaaggtgcaagcaactaattgtccatcagctgatgaatggataaataatgtgtggtatatccaygtagtggaacattattcagccataaaaaggaatgaagtactaatgctacaccttggatgaaccttgaaaacattacgctaactgaaagaagcaagtcacaaaggacaacagactatggaaatctatggagacaggaagtcattagtggttgcttagggctggggatggggtgaagtgggaggggtgggggtgatggctaaaggctttctttttgagatgatgaaatcttctaaaattgactgtggtggtggttgcacaactctaaatatgctaaaaatcattgaattgtacactttaaataggtgaattgtatgtacagtatmtgaattacatctcaaagctatcttaaaaagataaataagctctgtgcctcattttgcctcctacagtgtttcgtaaagttgtagtactaaaagggagatttgatagcaataatgataataataataaacaggctgggcgcagtggctcaagcctgtaatctcagcactttgggaggctgaggcaggtggatcacctcaggtcaggagttcaagaccagcctggccaacatggtaaaaccccatctctactaaaaatacaaaaattagccaggtgtggtggtgggcacctgtattctcagctactcaggaagctggggccagggaatcgcttgaacctgggaggcagaggttgcagtgagctgagatcacatcatggcactccagtcttggtgacaaaagtgaaactccatctcaaaataataataataataataaacaatttctaagtattattcttagyagtcacctacgcatggcactttgtgcagatgactcctgcatgtgtcagggtttttcttgcgggcaatgcagtctgatcagtataaactaggcagagaggtatttgatgaagggtttggggarctcagaaaatggactgggaagctaagaaccaggcatggaaatgagcaagaactaggggagattggggagcaggagcagaaatggtcttgcaccagggtcagaaatgcctgtggttgaaagtcagctgtcttcagcgttcaaacctctgtgctccagattccagctccagggtggttggcttagtgggtacctgcctctcagcccaaggagaacagagctttcgattcacagagcttccgattcacagaatttccagcctccactcaagaacaacagggatccaggtgctgaaaagggatagatgcctcccacagactccagggaagcattcagttgtgaccacctctacccttttaagggatcgaagcccagcctagcaggaaactgagctttggggctttgaaattttgccccaaagtgctgctagaagaattggattagataggataccaccatgtcactgactacttagggggaaaagaaagctgaggtagtgaaaacatttaatgaaatcctgaacacccagagtaacctatttcttccttgctccrttcccatttatatctgagaactgtgttcatgccccagatgttgcaagaatactgcggaaacaaaagtgttcgaaataattcttttttttcgagatggagtctcgctctgtcacccaggctggagtgcagtggagtgatctcaactcactgcaagctctgcctcctgggttcacgccattctcctgcctcagcctcctgagtagctgggactacaggtgcccgccaccatgcccggctttttgtatttttagtagagatggggtttcaccgtgttagccaggatggtctcaatctcccgacctcatgatctgcccacctcagcctcccaaagtgctgggattacaggtgtgagccaccgcgcccagctgaaataattcttatgctcaggatcaaaatgataaggggtcaattgtattaaacacacacacacacacacacacacaaactttgccttaaacataaatgtgtttcagaagcttggaagcagaaaataattttaggagctgagtattattaatcagcctatgtgttttcaactgcaccaagaaatatagcaaagatatgcaaactctttggatttaagacatcacctttgtgttttgacactctttcccaaaccccgcctaaatgacaggtgggactgttttcttttaaacagtaaaggcagggtcctgagaagacacttgaatggggcaattggaggagtgtttaatcgatgaactatttacaaagatgtgggcaggaagaccatgatagactgagcagttggggggctggaagcagcagggtacccctagaatctacagctctgagggggtgaaggagaagcagtttcaggaaggagggcgggatgggagctgatgggggaggatgcagtcacctgaggccaacctaaggggaaggagaagctgtggagtggaagccagggaaggaagggagccctgtgacaccatctgtgtaatcagcctcccaggaggtggagcagggtgacaagtgcactccgagggaggggccaccaggtgagtcagcccagggcccagctgctaagaccaggggcaggcctcctccaagtggggttgggcaggggggcaaaggagaacaaaaaagccactttacctacttctgtattgagtttttaaaaaagactgtattaatttacattgtaattttaaaataaaaatgtaaaaatattaaacatgactcggaaatcattgagtttgaggatctcatgagaagttgatgacccttcttgaggtaactaacgacactttggaaggtgaaaccaggttgctcgcccactctaagaaggagcgagaaggaagaaggagaaacagcactgtgcccccttctcccgctgcagtcggggcgagatttccatgctctgggaggtagtggaaggaagcgttcagtgaggcccttaaagacaatggccctgccagccagttgtgatgttgacaatgttctcctgcaggagggcgggaggcctataaagtaccaagcgcagtcctccatgagcaacggggaggcgatgagcgaccctctcctccagggatagacacagaccctctcctccagggataaacacagccagttatggccgggcgcgatggctcacatctgtaatcccagcactttgggaggccaaggtgggcagatcacgaggtcaggagatcgagaccatcctggccaacatggtgaaacccygtctctactaaacatacaaaaaaaaaagttagccaggcgtggtggcaggcgcctgtagtcccagctacttgggaggctgaggcaggagagtggcatgaacccgggaggtggagcttgcagtgagccgagattgcaccactgcactccagcctgggcgacagagcgagactccatctcaaaaaaaagaaaaacaaaaaaaccagccagttatatttaccagctattaattaaatttttcactggaagcagtcttgccttgtacatagggatgaaacacacacacacacacacamatacacacaccatatatatatttataaatgcatatataaaaattatggtaaaatacatgtaacataaaatttacaaccttaaccatttctaagtgctcagttcattggcatcaagtatatttgcattgttgtggactcatcacaccatccatctccacaattctttttatcttccccaactgaaattctgtgcccattaagcaaaatctccccattctcccctcccccagcccctggaaaccaccattctattttccgtctctatgaatctgactattctaagaacctcgtaaaagtggaatcatatagcatttgtcttgttgtgactggtttatgttacttagcataatgtcttcaaggtccatccatgatrtagcatatgtcagaatgtcctttctattttgcttgaataatattccatcgtatggatatgtcatattttgtctttctatttatctgttggtggacacttgagttgcattcaccttttgtaaatataacacatacacaatgacacacaaactccagtatgtgccagggacccgcacttgttaaagggtcatctataaaagagaaagagaaaatacatgtgccaacctaagtgagaagatgagaagcttcaagaagcttgagttgggcttctgtgcatcacaaaggtggagcctggactgtcatctgggcccggcctcttgggtagtggtccctgaatgactggcagaayaagaacatgaaatggtctccacgcagaagacagccacgtggaagtggctgactggtagaccagctgagatgaagactactccagtcytcacagcggtgctcaaatggccccatcaaatcaaatgtaatgaccaggcagagactagggtgaaaacagttgtggaaatccatttgtatgtctcctgtaatatatgattggattagctcatcccaactcaatgaacttcattgccaagttctccagaggaaaagtctgtccttctagtgccttctgttttcacacaataagcaaggatgacattttggcgtgacttgttaaattgtagcaaatgagacaactgtcagggtgtagacaaaggcaaacaaatcacttagtgatttgtcgagtgaaaatcgacctcaactaaaggcgctcactggagtctccttgtggcatttctcatgggcacttgctttcataagcatcgccctttgatgttattttgctaggagaatgtggaaaagtgtatttggaaacactgagtttcagagctgatagtaatgctgtatcatttcaatcagaaaggaattttgcaaaaaggaactgacttktttgtttgtttgtttttgagayggagtttagatcttgttgcccacgctggagtgcaatggcgcaatctcggctcactgcaacctctgcctcccaggtttaagtgattctcctgcctcagcctcctgagtagctgggattacaggcatgcgccaccatgcctggctaattttttgtatctttagtagagatgaggtttctccatgttggttgggctgatcttgaacgcccgacctcagatgatccacctgccttggcctcccaaagtgctgggattacaggtgtgagccaccgagaccagcagggactgacttttaacagatcagttatttaagcttgtcctctgtgcctgggatggttttaggtacctgtctgcattcactgtgttaatacagtrtagtcctcaaataccgttggtccttgaacaacacagatctgaactatgtggggccacttcttggattttcttccacctctgccacccttgagacagcaagaccaattccttctcttcctcctaagcctactcaacctgaagatgataagaatgaaggccttgatgatgawccacttccatttaatggagagtaaatatgttttctctttgttacgattttcttartaacattttattttctgtagcttactttgtgcacagtatataatatacacagtatttaatacctacgacataaaaatatgtgttaatcaacattasattatcagtaaagtttctgatcaacagtgggctattaggagttgagtttggggagagtcaaaagttattcttgcattttcaactgcgaaggaagtcagtgcctctaaccccagtgctgttcaaggatcaactgtagttcaccaagaaagcyggggttgatcccattccagccctaccctgctcttggtgggcacagagagttgtgagacctacctctggccagacactgttctatgtgtggaaatattgcaatgaagaagatcaaccmtccaaatgctcactgtggccaggctcggtggctcatgcgtatcattccaactctttgggaggccatggtggaatgattgcttgaggcccagaatttgagaccagcctgagcaatatagcaaaactctgtctctacaaacaaacaaataaacaaacaaacaacaaaaaataatgctytctgtacataaaccagsacataagtaatataatttcatgggatgatagtcactatagagaagatargggtggtgcagtggaataaggtgagatagggttggtgggcagggctcttctctgggggtcatcagacgggtgaaatttgagctgagatatgagtgatgaggagccgctgcacaaagatgctggatagagggaacagcaagatttgtgycttaggaagctttgagtttctgtgggttttgttgttgttgttgttgttattattttttttgagatggagtctcactctgtcacccagtttagagtgcagtggcatgatcttggttcgttgcaacctccgcctcccaggctcaagagattctccttcctcagcctcctgagtaactgggattacaggtgtgtgccaccaygcctggctaattttttgtatttttagtagagacggggtttcaccwtgttggccagactggtcttgagytcctaacctcaagtgatccacccaccttggcctcccaaagtgttgggattacagacgtgagccatcrtgtctggccaagtttctgtgttaatggacacagaagaagtcagcacagctggaaggcagaggacaaggaggtgcatggtccaaggctgtagagagaagggcagcagccaggtcgtgtaagtgactgcacacggcaaggattyaggagtttcctctcattgcaatgggcagccttggggagttttcctctgggaggaaatctcatggatttatactgaagaaatarctggctatgtgctstgtgataacagatggaagggggctggaggggaagcagagaatcrggttgggaggcctgtgggaccgctagaagccacccctgcactaggtaaacagtgtggacctgaaagggacaggctgaagcacgaagtgtgatttacaaatattactcgagccagaataaagacagctgcctggaagcctcagacacaagtgaccttggatatgaactccatttggctttcgtcacaaggtttttaaaggaacaaaaagggaggagtcagggagtggcctgatacaaagttctgtcaggagttctcattggtttccagaaataacattgattagtgataggctatacattattaagctatagggtgtggtttacagtgtccagtgaggcattattaggttaattcataactactcttggcaatagcaagcagtttcagtggatgaatacatagctcaaaaggggcatgtaggatgcgattgatgtctaattttaatgcctatctgggcctaataatttgaaaaggctcacatccctcagataaaagttattttctttcttcaacagctgtgggcactgttggagaagtataatggaaaacaaaatctcccaacccagaaatcctctctacaaaggtagcaaagaaagaaaacactctcattattgagaaaaacattaaaccagaaagtgttacacaccacaagcaatctgctaagagacagccaagacagaaaggaagctcacctgcttatggagccaagcagacacagctcgttccacacacgttttcaagacggacagtaactgttaccaactgagtcagcttttcccctaaagatggtatcgtgaagccaatacatgaaacccaaagcgagcctcaagcagtgcrgactttattcaatggccaaagaatggagaagcaggagcatggccgcaagtcaacttcttgtctagtgagaggtgagggggttaaaatatagggtatcytggctgggtaccctgcctcacgcctgaaatcccagcagtttgggargccgaggtggayggatcacttgagatcaggagtttgaggctagcctggccaacatggcaaaaacccatctctactaaaaatataaaaaacaaaacaaaacaaaaaaatagccgggcatggtagctcacacctgtaatcccagcactgtgggaggctgakgcaggtggatcacctgaggtcakgagtttgagamcagcctggccaacaaggtgaaaccctgtctctactaaaaatacaaaaattagccgggcggatcacaaggtcaggagcctcctgagtagctgggactataggcgtgcaccaccacgcctggctaatcttttgtatttttagtagagatgggttttcaccgtgttagccaggatggtttcgatctcctgacctcgtgatccacctgcctcggcctcccaaagtgctgggattacaggcgtgagccaccgtgcccaggccgccttcctgtttcttaaagataagatagagaagacagrttagagaagagtagaaattcagctatgtcatgtaggcattacactgggtgacataagtagtaagagaacttgacaacactacttgtcacacacagctcattctaactttacctggcaactgaggtgaccatctgtattagctaatgggctttatctagagaaaaacaagcttcttacatctttgtgacaggaggcagttttgcagcttggaggcatgtgcccactgaaggcaggctstcaccctcccacagacactgggagctggggccactgtctctcccttgatgtttgcctttcaaggagatggctcccgggtccttgagaaacacatgcctgggtaatcaagctgacaaaagtcctmtctgatcttcacaaaaatgttatatacatttgaaagagaggagaaagtgcttataattacaagttttctaaggtaaatgctctgagaataagagagggagggaaayctcttcccccattttcaaccgggagaattaagcctcttgtttttaagttgcatttgtccttacagtggctactaggtgttgggaacactgcccgggagctaggaagagcaattagggctggaggctgtttggcgccaacaggctgttgctgagtgcggatgaaagtccagagagagagtggaaggtgggggtcaaagggcatggtggtgccctgcatggcagatggtggagaaactgcaccaggcaggtgcctcaggctttctgggtcaggggagagggtcaggtggccyttgaagttctgtttgctgttagcctgactgagttaactgcatgggtacctgactgtctttgctcagtctcctagtggacaaccacatttccggaaggcttttcacgagtgatatagcaactaatgctctcccagggctcactgcctggcaggctctgctccaaatgctttcatatgttaactaattcaatcctcactatgaggattctctactcccatgagacagggattgcagggagtataaggttgtgttggatgtgtttcctggcattagtaaaagaggatgtgaggcaagagcaaaactaatgcatgtgctgaaagagctatggtgcaaagagtacacamaaaccttttctccccttctctgtatgctgctgtggacactgttacaaagcatgaaaatgaggccgtagatgcaaaagcttaaaagggtgacccatacctcaaaagttctcagtaagtggcagcattttattatcgtggctatyattttgccagttatatcttaacaggtataaatattgaaacctccttagcgaaaattataacggtgagcaaattatgacagcggaggagatctgacctaaccatctccttcttgccttttaayctctaaactgtcctgggtcattttggggcatgggtcaagctaactttaggagaaatttagtttatagtttaaatgatgatagaccttcccaaaactaagtcatctttgtaaaactaatgaaaggccaccaggtcaaaagaatgagaggggcctgaattctgctgagatgtagacatagttaagcaatcaccagccgttattctggaggtcatgaaatttgcaactttctcaattactcctataattaacatcactmctctagaccctaaaattggccttttcagattccttttcagacttttgtatttctgaaaccaggtgactttacctggacccacgacccctacctgtggtccctgacctagaagcaggctcagcatatgaggaccattttttccacacccctatgattgcatctccaaccaatcagcagcatctgttctctagccacctgcctaccaaactatcttttaaaaacccctgccttcatatttttgaggaggctgatctgagtaataataaaactctggtgtcctgttcaggtggctctatgtgtataaaactctttctctattgcaactcccctgtcttgataaatcagctctatctgggcagtggggaagatgagctaattgggtggttacaatattacctcttcaatgtgactgaggttcttgaaggcaggaaattgtcatataatttatgtctcccatgtcagtaccttatatagggtaggtatcaataattactcataaaagatgagaattattggttccctagaagtcattttcccattcyaggcatggtgccttttaggggacakarctctgactgaactttatatgtcctccttagttagttacttagggtcttgatttcttctggaggctgtatttstcatttaaattttgctagatattatgcatattacttaagttttcacacttaatggcataaatctgtccctagtattccctctcaattttctaatctcctctgtaactgcagtctatttatatgtcctcagtaaatatttgttgagtctgatagtttttggttaygatcatggactagtgcagtgagggcagttggatattttcctcctgggaggacatctgggattcacaatctggatgtttggtatcatgagacaatctccctgccctggcttggggggccacccatgggttaaggcataagtaacaattcctgacaagagtggrgtcattaatgtctggagcaggaagctgaggggagttgtgtttttctcttgcctcaacattgtaggaggagagagaatcctttctaggcatcagggtcatccctgagcactcctggtgtgattttagggttctccaaggcccactgtggttctaatttcctgccaccatccctgaacatcccaccattcatatcctcagtgtagaaaacagagatggtaactttgactccagaaggtcaccattcacatgaccacttaggagaaaaggagaagggagaacttycagtattttatccaaattctttattcgtcactcagctagcccagacgtcttcttaggaagcattggragatatgagagagtggtgtggggtgggaagcaaatggttggggagacatagcatctggcttttttgggaagccctgctgggtttagacaaatctgcagacaggaggaagaatgagatgaatggcacttaagtgttattcctctccagatcatgattctcccagtttgaattaagactcktctctgagttttggaggagagatgcttggaaaggatgattgaagagattcattcacccattagactccctactattgattaaggatgtaatgaagtgatataagtcatccaataagctatgcttactatgtttttttttaaacatagtaaatgcaagccaaatagagccctctcccaccttagccagtagagtgacatcttaggatcttaggtgaagtcttttttttttggttcttttagtttttaaatttggaggattaggatgacaaaaatgacacctatgggtgaaggggtatggaaggactggaatgacattcagacttttttttcagtaggtttgctggtttaaaaactgtatctgaggacaaaatgcttggattcaaatcttggctccctaactaactgagatctgtcttctctgttctttgtcatcttyatcaataaaatgggggaaaataacactgtctatgtcttagggagaawaagatggaacattgcatataaagtgtctaacacaagtcctggcacatagtcatcaataacttgtttattattgtgcttgttaaattccattcacctggaagatccagggatccattcaaagttggctctggctgccgtgatgccaagtgaagtcattccaattttgcagtctaaatagcacacactgccttgtccctaagagaaataccagccccagacattgtgaattgatcatttccactgaaccatttataaggcagagttgatccttatcattaaggtgagcaaagcagttgttgtgggcacttctcttcatgatgatgttcagtcatttaggtctctgtggaatggctggcaggaggccctaatggtgacagaaatcccagtgactactgtcytactggctctrgttgggagcctttcctagcagtcctaccatgactggcctcttggatccactctgaattcttctacttctctttgcagtagaaagrcattaactgatatttctctttccaaatttctttgcaatgttttctgtagaagaactgaacattaaataaatattatttctagaactcagttttcgcaaaagatagcatttcagtcccacaagagcaatatttatatcattgcaactatggggcttcggtgggaaaaggatgacaatatttttccatttggatagctgtttcttatctaaacttattaaatggtgagcagaactcttcattgtagacttttcccaaccctgagtgccaaagcaaacacacaaagttcggaccactgacatgttgctgcagtagtataagggcaaataagtctgaatggagataacagacttggaaacggtactttgtgtctctactttcatggtccttccctctactgacatggaaatagcaccckaggcctgcccggggccatccctgaactagggatgcatcccccgtcaaaacaaactgaggacattggataattcacattttacataacagtattttactcagatttatgtggctgctgatgaattttcatcaaaaaagtattttctggaataaaatccattaaaccaatttaatcccttaatcaatttttatgtagtgtagttaaatcatttttatttttctaaaagttaatgaaacattttctatttttatttctgaaaagtaattttcatcaggatagattcttttccatttaaagcttataataaagagctaattaatcaattgatttttgtccccatcagattttcctgagtatagcttctgctactgtgagttttcttttatggccagatccaaagtttccttttgttttatttttcccctgctgtagtcaagtccaatgtctcaggctcaaattctgcacatctaaattttgccagsaatattctgtttgtttgtttgtttgtgacaatgtcttactctgttacccggactgaagtatagtggcatgatcatggctcactgcagctttgacctcctgggctcaggtgatcttcccaccccagcctcctgaggaagctgggactacaggcacrtgccaccaaacctagataattctttgtattttttgtatagatggggttttgccatgttgcygaagctggtctcaaactcctgggctcaagtgtttcacscacctcagcctcccaaagtgctggtattacaggtgtgagccactgtgcctagccagcaatattctttttaatcagttttygattggtgaaaaagtgactatttctacctataatattcattatggattggataaaacatattgtctaattattttggtgtcattatattcagaattcccagtatagtcatcccttcatacaggaatggaataataaaattatacattaaataagtgttgtaaatacagtagatgtttctaaagctaatttttaaatgaaaggacaatatataagtctakagytaactcctctgtcatgcacaatctgagttaacagaatagwttaggggttagcaagctttttctataaagggccatgtaataaatatttcaggctttgcagttcatatgttctctgttgcaacaactcaactgtgctgttgtagcacaaaagcatcctggactattcataaactaatgagcatggctgtgttgcaataaaacttgtttacacaaacagatggtggtccagyccagatttggcccatgggctgtagtttgccaatccttggaacagataaaygttcatgctattatttgtttagtaagagtattctttagttgccaggttgaccatgaactaccataaatagagagctcctggaatgtacattggaaaagtttttctttttgtccagtttttcaggatcacagctgttatacaaagctctgtgtaccaacaatgcatatatcaccaggctcatatacarttttcttagaggagctcaataccctgtggacttaaattaagaaccataaaactgcttgagagtggacaaagagaagataaccatttttcctatcttactgaaaatagaagcagaacaatcactcggactcacatcataggactaattatggatggagcatattagatgataaaataaaaactaacaggaaaggaaagcatgacactagctttggtattcagtcatggcttagagttactagcctcatctgggtatagcagacaagctctggccttaggaaaatattatactctacactttgatgactcccctaaaaacaaaacaactaaaacaattgtaaaaagcaaagcctattacaaagagggagccaaaattcaacatgaaatatactgtgcttaatagaattgaattcttgaataatgttcttctggcctccaagtgagaataaaggttgtgctatttaagaatgtttttcagctgcacataactgcctgtattagtccattttcacactgctctaaataaatacctgagacttggtaatttataagggaaagaggtttaattggctcacagttctgcatggctggggaggcctcaggaaacttacaatgatggtggaaggggaaggagrcaccatctttgtaaggctggagaagagagaaaagtgtgtgtgaaggaggaactgtcaagcacttataaagccatcagatctcatgcaaactcactctcatgagaatagcataggggaaatcgtccccatgatccagtcacctccctctcttgacacatggggattacaggtgcctcccttgacaggtkgggattacaattcgagatgaaatttgggtggggacacagagctaaaccgtatcattctccaccggcccttcccaaatctcatgcyttttcagatttcaaaaccaatcatgccttcccaacagtcccccagaggcttaattcattccagcattaacccaaaagtccaagtccaaagtctcatctgagacaaggcaagacccttctgcctaggagcctgtaaaatcaaaagcaagttagttacttccaagatacagtgggggtacaggcagttggataaattggccaaaacagaagggctacaggccccatgcaagtccaaaattcagtggagcagtcattcaatcttaaagctccaaaatgattgcctttgactccatgtctcacatccaggtcatgctgatgcaagcagcaaggtcccatggccttgggcagctccacccctgtggttttgcagggcacagcccccttcctggctgctttcacaggctggcattgagtgtctgtggcttttccaggtgcatggtgcaagccaggtggatctaccattctggggtctggaggatggtggccgtcttctcacagttccactaggcagtgccccaatggcaactytgtgtgagggctgcaaccccacatttcccttccacattgccctagcagaagttcttcatgrgatctccacccctgcagtagacttctgcctggacatccaggcatttccatacatactctgaaatctaggttcccaaacctcaattcttgtctcctgtgcacccacaggcccaacaccatgtggaagctgccaaggcttggggcttgcaccctctgaagcaatggcctgagctgtaccttggccccttttagccatggcttaagctggaggggttggaacgtaggacaccaagtccagaggctgcacagagcaggcgggccctaggcctgcccacaaaaccatttttccctgttaggcctccaggcctgtgatgggagggactgtggtgaaggtctctgacatgccctggagccattttcctcattgtcttggtgattaacatttggcttctcattacttatgcaaatttgtgcagctggcttgaatttctcccaagaaaatggttcttttattttctaccccatcatcaggatgcaaatattcaaaactttyatgctttgcttcctttttaaacataagttcctatttcagatcatttctctcaagttcaaagttccccagatcctaaaggcaggggtaaaatgctgccagtytctttgctaaagcatagcaagagtgacatttgctccagttcccaataagttccttatttccatctgagaccacttcagactgaacttcattgtcaacatctctatcaacattttggtcaaaaccattcaacaagtctctaggaagttctaaactttcccacatcttcctgtcttctgagccctccaaactgttccaacctctgcctgctacccagttcaaaagttacttccacattttttgatatctttacagcagtgtcccactctctgcagtactaatttacttgcctaaaaatgctgcaaatagtactcacacaatagtgcagagataggcaatcatttgtactagtttaaataactctatatgccaagcaaaaacccaggtgttttctatcattctttgcttgctggcttttggtccttacacttgttgcctcatggttgcaaaatggctgttttgtctccagacattacatcaacatttgaagraggaagmagggttagtgtctgagccactgactctgctgataaaaggacagagaaagctctcccaaaagccctcaacagatttctgtttgtctcattggtcagaactatcttacttgaccactaatggttacagaggagagcagtgatgcaggatttttctyggyccctttgccagtcagggacctcttgctggtgatgctggaggccttgcttggggcacactacctgtccctggaggtgcctcacccaatcggcccccctgggccaggtctggcttgtataccagttcctgagttcttgtcccacgcccagaatgaatgaggctgtgctgaactctgaagggtgagggtgatggagaagaatttttttgaccaatgaaacagctttcagtggggaggggatgcaggggtggtctccctaccagaaggtgggaaagtcccccatgtggctgggtctggggctttttatggactcagaatggggagtatgtgttgattggtttatgagtatgcaaaaaaggttaaagcaaagactctactcaaaggtgggcatgacagtgtagaaaatcagttaggaaaggacaggtatatgtaaaataggtgaagggtggggatcaatcagaggaaagcacaccaaacaggaagacaagttctcaatctggtccaaggatttaagttgtagcttggctttcaggctttaaactgtcttcagcttggaggcgggatttcaccggggacccgccccatctgcctaggcatttggctgcctcctcctgcccttagtaggaaagtgagtgtttcattttctcaatttatctgtggatgtggacaaaggrgaaaggggtagggaatagggggttgtagtcagcctccaacagrttattaccactgaaattgtgccctaaaggattaaagaagtcagtaactaacagaaattcttgagtttgcaaggtaagaaacaacttgctcaaatgctgaaactmcctctgcttgtgagataaaactagcagaaatcagttggaaccaccatggccaactggagtttgcacacagtgagcttggtgaagtcacrgccygaatttctaccacgtgtttcatattaaccccttgaaattttctcatgggacccctgaggcaacatgaagagataactgtgcaaacctgaggattttctaggcctcccctttcctttcactaatcacctacaatcccaatatccacccsctaaaccttttctaataaaattatgccctgccttaaagccrtctcagggagacaggtttgagcttgacccctgttgcaatagaaagcttttcttttgtcaaaaacccagagtcatagcactggcttctagtgcatcaggcagcaatcactttttgcttgataacaccatttttcataagtacctgaaactggattcactaattatgtcagctaatgttgacattgatagaggtaaacgactcatttcttatttataaatctgcaactgttgacaagaaaagccattggcttggttataacttttgaaatgtgctgcaattagccaggtgtggtggctcatgcctgtaattccggcactttgggaggccgaggcagscggatcacgaggtcaggagatcgagaccaccctggctaacacggtgaaaccccgtctctactaaaaatacaaaaaattagctgggcatggtggcgggcacctgtagtcccagctcctagggaggstgagacaggagaatggcgtgaacccaggaggcggagcttgcagtgagccgagatsscgccactgcactccagcctgggcgacagagcgagactccgtctcaaaaaaaaaaaaaaaaaaacataatrataataataataataawaaatagaaagaaatgtgctgcaatcacaaaatttcccagaactttatcttatatgacygttttcctccagctcatggacagctatgtctgaatcaacagcagtccatagggcactgcccgaggtatcagrtgatgtctaaaaggattcaataggaggagcaggcatctgggaatataccaaaggaaataaagtcaacacctagtaacaatatctgcactcccaagttcaatgcagcattattcacaatagccaggatatggaaacgacttctgtctgtcaacagatgaatagataaagatttggcatactgtatacacacaatgggatactattcagccttcaaaaaagcataaaggccaggcatggtggctcatgtcttaatcccagcactccgggaggctgaggtgggcagatcacttgagytcaggagtttgagaccagcctgggcaccatggtgaaaccctgtctctacaaaaaagtacaaaaaagttrgccaggtgtcatggcatgcatctgtagtcccaaytaccagggaggcagaggtgggtggatcacttaagccagggagktcaagactgcagtgagccatgattgtgccactgcactccagcctgggtgacaaagtgagaccctgtctcmcaaaaaaaaaaaaaaaaaaagcggtgtggaactgtgccgcttgctacaacatggatgactggaagacattatgctaaatgaaacaaggcagatacagaaaggaaaatactgcatgacctcatttatatgtggaatcttttttttttttaaagtgaatatacagagatagagaatacaacagtggttaccaggagttgaggaggagagcagggaggagatgtaggtcaaatgatacaaagcagcagatatatacgatgaacaagtctagagatccagcgtacaacatgaggactatacttaaaaatgtcacattgcacttgggatttttgctaaaagagtagactttaygtgtccttgccacctaaatgagtaactgtgagatgatggatatgttaattttcttgactaccataatcattttactatcttcatatcaaaatatcatgctgtacaccttatataaatacartaaaaattattattaaaaaagaaagaacaggctgagaatggtggcttatgcctgtaatcccaacactttgggaagttgaggtaggaggatcacttgagaccagtagttcaagatmagcctgggcaacatagcaagaccctatctctacaaaaaataaaaataaaaaaattagccagatatggtagcatgcacctgtagtcctagttactctggagactgaggcaggaggattctttgagacatgatcatgccactgcactccagtttggaggacagagcaagaccccaactctaaaacaacacacaaaaatacagccatttctcctgggtgaaatgggggagctcagactattttgttttatttgtcaggagtctaaagcccatgtgagccaacttaagaaaattctgtttgtatttgagtgttctttattggaaagaaatggacttttccctaatgagcccattttacaaatcgagagctccaaatgcccggttccagcccccatgatatagatgggcagcaatgaggaccagaaatgctgggaagtgtccttgtcatgcaaggaaaacttggaacttcaaggatccatcatgggatgcaggacagtaggctccacccctcttcctgctttccagtaaatgatgttcagggctcacatgyctcttccaaggcatgatgtggggttgcagttctgatcccagcagagaacaaggctcctgtgaaacaattagttttggctcagaggcaaaaaatggaaaccccattcctgtatttacccttcattctttccttacctcatacagctggttccaggtttgattgcatcatatacataaataaataatctgctttcctggtttggtttagttttgctggagagaggagtttatgtgttcatcccatgactagctgggtggtcaagagattggaaagtaggagttctagtttagaccaagtctcatctcagaaaccacagagtagaactgatcccaaacgtcatcatccctgtagggaaaagaaagagagatcagactgttactgtgtctatatagaaagggaagacataagagactccattttgaaaaagagctatactttaaacaattgctttgctgagatgttgttaatttgtagctttgccccagccactttgacccaacctggagctcacaaaaacatgtgttgtataaaatcaaggtttaagggatctagggctgtgtcaaagtggctggggcaaagctacaaattaacaacatctcagcaaagcaattgtttaaagtacagctctttttcaaaatggagtctcttatgtcttccctttctatatagacacagtaacagtctgatctctcttttttttccctacatatcccaatagcacctgcctgactaatacatcatgctctgctgactccatatgtggctggtttcctggatccgattctgactgatggtatctgttctcacrctgctaataaagacataycagagactgggtaatttataaagaaaaagaggtttaatggacttatgtgttccacgtggctggggaggcctcacaatcatggtggaaggtgaaggaggagcaaaagcacatcttacatggtggctggcaaaagagagaaagcatgttcaggggaactcccctttataaaaccatcagatctcatgagacttatgcactatcacaagaasagcaycagaaagatccaccctcatgattcaattacctcccactgggtccctcccrtgacacatgggaattatgggagctacaattggagatttgggtggggacacagccaaaccatatcagatggcttatttggtttctatgtagaacctctgcttttcattcaacagtcttcatttagccacagataagctctgtccctaacttccrctgatggaatgtacacataagaaacttccactgatggaatgaacacagaaggtgcctactgggaagaaaactggcctgaatctgagctgggtcaaatgtctgcagtcagtttgaatggctgctccttatgggaataatttacattctcaataaaattctctagcaattttctgattgattttaatgagctttaaagccttmcgtagaagatcccccagctgatagtcagccttgggcatggattaagggcttttaaccaatcttgcaacaagtttaagcagatattctttattgggtccaatctaacyaaaattattttcttatgttctccccagtaacgtgtcattattaagagaagtttggcttgcttagaggccaaatttagagggtcctgaaattttattttcttttacaccactttccagcatgttacctgatcagttgtttattatctttgctgttgaatggagtgatcattccaagggccygaggcaggaggcccaggcacagtggaaactctcccaaagaccaggatctttgttttgttccctgacatatgctgagcaccaggaatagtgartgaatgaaacaaattgwgaggctttaaagagccgaaatatttaaacactgggcacaaggttgttgcttaatcagtgctagatccttacctcccccttgtgtccaggtskacttgttactgcagttaaaccacttgctgatcctcaaacaactagttagtggcacagccaggcctaggaccccagtctctactgttccaactaacccattcgcaggcaggagcactttgaatggtctcttattttaaaaaaattaaattaaaattgtctatttatttagagacagagtcttactctgtagcccaggctcgagtgcagtggtgcartcatagctcactgtaasctccatctcctggcctcaaaaagtgtttgaattacagatgcgaggcactgtacctggcccgaatgttctgttcagacaaagccacctctaagtcgctgtggggccccagacaagtgatttttgaggagtccctatctataggaacaaagtrattaaaaaaatgtatttcagaatttacaggcccatgtgagatatgatttttttaaatgaagatttagagtaatgggtaaaaaagaggtatttgtgtgtttgttkattgttcagtcagtgaatgtacagcttctgcctcatatccaggcaccatctcttcctgctctttgttgttaaatgttccattcctgggtaatttcatgtctgccatcgtggatatgccgtggctccttgaacctgcttgtgttgaagcaggatcttccttcctgtcccttcagtgccctaataccatgtatttaaggctggacacatcaccactcccaacctgcctcacccactgcgtcacttgwgatcactggcttctggmgactctcaccaaggtctctrtcatgccctgttataaygactacaaaagcaagtcttacctataggaaaataagaattataacccttttactggtcatgtgaaacttaccatttgcaatttgtacagcataaacacagaacagcacatctttcaatgcctgcatcctgaaggcattttgtttgtgtctttcaatctggctgtgctattsttggtgtttaacagtctccccagctacactggaaacttccagaaggcacttttcacttgcttgtgtgttttycccagtgtctattagaggcctttgcacagggtaggctctttggagcagctgaaggtcacacatcccatgagcgggcagcagggtcagaagtggcccccgtgttgcctaagcaagactctcccctgccctctgccctctgcacctccrgcctgcatgtccctgtggcctcttgggggtacatctcccggggctgggtcagaaggcctgggtggttggcctcaggctgtcacacacctagggagatgctcccgtttctgggaaccttggccccractcctgcaaacttcggtaaatgtgtaactcgaccctgcaccrgctcactctgttcagcagtgaaactctgcatcgatcactaagacttcctggaagaggtcccagcrtgagtgtcgcttctggcatctgtccttctggccagcctgtggtctggccaagtgatgtaaccctcctctccagcctgtgcacaggcagcctgggaacagctccatccccacccctcagctataaatagggcmtygtgacccggccrggggaagaagctgcygttgttctgggtactacagcagaaggtaagccgggggccccctcagctccttctcggycttgtctctctcagatgtaactgagctgtgggctaggaggaaaaggccgggaggaggcacggtgatgactgaaaaacctctcccctctcataagaccagtcatcyggacgcgggctttcccccactcggtgcccacctggggtcttacaggaggagctgctcctcctcagcaataggacaagatggtcaggtcttcctkcttccgctgagaaaagttagggtcctcaggaacggagcagactggtacaggaacagagtcatcatggccaagagtccaccgggtcctcttgccatcaggaggaatagcagggcttgtrcaggaattggggctggagggaaggrccgggctcggtcagtctccagctgggatccccagagtggtcaccctacccctccctcgagacagactgcctgactgtgtgtcatcaggctggtcaccrtctccctraacctcgatttgctcacctataaaatggaactaataacgatgcctgggctccctgtctcaggggctctggtatagctgaagagaactaatataacatgaaagtgctttctaagctttgggataagctaaaaggcagattccaattttattcgagggcagcrtagattggtgcttcagctcgtrgatgacagagtcagggggcctggttctgagtcctagttctgtctcttcccagctgtgtgacgttgaacaagycactggacctctctgttcctctgcaaaacagcatgaaccaattcattaactacttctccaggatgcagtaggtcccagggactatcctaggaatgtgggctgtattagtaaacacaacagcgggaaccctgttccggggctcacattcacatcagagcaaacagacaaagacgctggacagaataagtgcataactacatggtacagagggttataaggagggaaaaggggagctggatgagagagttgagagtgcccggtgtgrtggggaaagctgcagggtgaaatactgcatcagggaaacctcagggaaggtgaggactatggtgaggtcagaggggttgatatgagaacagtgccctgcaaatggcaggcaccacaggagcatgagccrtcatcttcacctttagcattcagcccgggagaagtagggagacatagaaggggcaggtgctggccaagaggcaggggcaggagaggagaaggyggaggggcactcagggcgagggtgtcaggcccrccaccccagagcaccattactcccaggacgcggctgcgtgcagacctggaaccagcytagggagcagccgcagatcacaactgagaacaaacgacagtctctgcctcaaaaatggcccatggaattgcgtctctggagacgctgcctgagcaggagcagcacagtgagcgggctgcatcgaccagcgccatccaaaccccgaacagttggcgcttgtcaggcaggacttcccagcagtcggttcccacaggtttcccctgttgacctgatttgatgtgactgtctagattaggtgtgaactggtggcttaggcttctctgcacagaaaggcctgcaagcagcagagagagttttctgttccatttttccatgtcatgtggctcttcctgagaacagyggatggagtcaaatgcatggggagtkgggtgagatggtagctgaggtcagaatttggcatttgaatgactgaagcagaacaaaacacaccaggtacttcagcagctgcaccgtgttgagggcaggtgctggttacgggtctgggtgagggaagccagctgccartgtaagaagaatgactgggtatgcttagatgaagcagaaaaatctaggcatcaaggtggccttgagtcagtgatgacacgctacagctccaaggaagcctggcctagccctggggggacagaaaaggccaagaagtgacgatattgcagtacacccccctccacaagaaatgagtgagatgtggtacaaaatgttagaattgaatgaatcaatagaataaacgttyatcccttcaatcaagaagagtcagatgaaatgaattagcagggccagcccaagaacctcttctgggggtctcagggtagctttcatttgtagcagctgaggckgaagcccagctgcaaggcctttgagagaacgtggtgctggacccgtgtctagggcaggggttctaaaccctgcttacatatcagagtcacctgagaattttctatttttttttttttttttttatacgtkgtcccagcacagactaaggaatccaactatcaytgggcaagccatgctaggtatgcatgcctttrgggctctgcaggggatagcgctatgcagggatggttgagagctgrttttggggttgagacacgtgggaaatacttggactttgggctgagcctgtggtgctcaatcccggctgcatgttgggaccacagggagatgacaaaaccatccccagccctcaccctagggccctcgaatgagcatctcaggggtctaggaggcctccacaaagacctactgrttggcacacacttgtttctctaggaagaraacttacagctgcaggcaggagcatgtcttaatctgcttgggctgccataagtaccacagactgggagggtttaacaacagaaatgtgttatctcacagttctggaagctagaagcctgggagccagccatcagcagagytggtttcctctgggtcctctatccttggcttgtagatggccgtcttctctctgtgtccccacatggtcttccctctgtgtccccacatggtcttccctctgtgtgtgtccatgtcctcatctcctcttctcataaggacacaggtcatattagatcagggctcaccctcatggcctcattttaacttawtcatctctttaaagatcctgtctccaaataatggtcacattctgaggtcctggggttgaggacttcaacacrggcattatggccgttgggggaggtaggacataattcagctgatattggtgcattttgcacttggatcatgtagatattttccatggagctttgaatccatttcttcttttttttgtagacatgaatggattwattctgggctaaatggtgacagggaatattgrgacaatgaaagatctggttagatggcacttaaaggtcagttaataaccacctttcaccctttgcaaaatgatatttcagggtatgcrgaagcsagcaccccagtctgagatggctcctgccggtgtgagcctgagggccmccatcctctgcctcctggcctgggctggcctggctgcaggtgaccgggtgtacatacaccccttccacytcgtcatccacaatgagagtaccygtgagyagctggcaaaggccaatgccgggaagcccaaagaccccaccttcatacctgctccaattcaggccaagacatcccctgtggatgaaaaggccctacaggaccagctggtgctagtygctgcaaaacttgacacyraagacaagttgagggccgcaatggtcgggatgctggcyaacttcttgkgcttccgtatatatggcatgcacagtgagctatggggcgtggtccatggggccaccgtcctctccccaayggctgtctttggcaccctggcctctctctatctgggagccttggaccacacagctgacaggctacaggcaatcctgggtgttccttggaaggacaagaactgcacctcccggctggatgcgcacaaggtcctgtctgccctgcaggctgtacagggcctgctagtggcccagggcagggctgatagccaggcccagctgctgctgtccayggtggtgggcgtgttcacagccccaggcctgcacctgaagcagccgtttgtgcagggcctggctctctatacccctgtggtcctcccacgctctctggacttcayagaackggatgttgctgctgagaagattgacaggttcatgcaggctgtgacaggatggaagactggctgctccctgayrggagccagtgtggacagcaccctggctttcaacacctrcgtccacttccaaggtaaggcaaacctctctgctggctctggccctaggacttagtatccaatgtgtagctgagatcagccagtcaggccttggagatgggcaggggrcagccctgcggacatacctggtgaccacccttgagaagtggggaagtggctgctccgctgggtccctggatgggccgtccacctcctggacytgctgccctactatgtgcacgactatacaacatcctttttcttacatcatttaatccccttatgatgtggtgaagaggtatttgtgcctttgtttaccagtgaagaaatagagactcggagaaacaaagtgccttgctcaagatggcacagccaccagtgggggtcctgkgattgaaacccacatctcctggccccacagcccagttctacactcrgaagggtcaggttcatatctcttgagaaggtcaggaactggggtccctggcccatgcagaaataagcaattggcttgcttaaatccctttcatgttaggaggggcattactgaaaaccctctactacaaagattgttgatttttttttttttttttattgagacagggtcttgttctgtcacccaggctgcagtgtagtggtgccatcattgctcactgtagccttgaactcctggcctcaagcgatcctcccacctctgccttccaaagtgttgggattaaaggtgtgagccactgcacccagccacagattgcttaaagcattcatttaacaaatacttgttgargatttgctacttgtaagactttaagcctggcatctcagaggaggccagaggagggctgtataggccctgcctccaggcttttaaaggtcaatgggcaaatgcctaggatttggagctgcagggaaacgtgctccacaaggtaactcagggaagcctcggggctctcagaggacagaggtcactggggagcggagagcaggccttgcctggcagtgagggmaacagggctggtgaagctaggagcaagcatgatgagcccagcctgcagagtttggggcaaggaacgaggatggggcggttgrcttggcatgagtgttgaaccagaaaatgggcctggggagggcagagctggagacactttgaacgccatgcttggtaggtgtggraatggggacgcgttctgttcagaggtcatcccggaagcctgccgtgtgcagactggaggcagggaggattgtttgaaggttacgcaagagtccaggcacacagtcacgggaacacgtgctcagggagcagctcggcaaatccatgggtggggtggggctgaggggtgtgtctaagagacactgaggaggctctgtcaagatgttaacctcgtgagggacagagagycaggcgggaggtgaaagacaagactgtggagaaagaggttcagtggcgcatagtgatttttcttaccacracaacctccttgaggtctttcccttcgggttcagggrgaggtgatagatggggggattgctcagccctggcactgactggtcacaggggcagaggccagcccgagggttgcccsgttgagggtggcagcacactgtgcagggcagagcagggacacatggacttagcctgctgtccctaggagaagtgytgggaggagcgctcactgagaaggagggtcctgcagaaggcaaaggcaagaaagccagtggcatctgaaatgggtctcccttcgaaagagagcacatccacctgacccagaccgcagagccaggccaggaggmagaggaggaagaataaaaaagccaaccacatcgggactcaaaggaagcccaggatcctcgccggcctccaccgcatgctgccctgaccctgccccacttcctaactttgctggcctcagtttccgtcaaaggaggcagccacttcctgcccacatggtctgtccagtgaggagatcgggggctgtctmgggacctctaggtttccctttagcaatgatgttctatttacatgacctcagcaggcagctagatgtgtcccactagagaggacctraggatctggggcctgatgggctccagggtaccgtctgcccagtgcttgctgtgctcctgagcatggggcgctggccctggyggtttccatgacaccaggtcctgacttgacctcgacagatttacctagcctccggatgagaatggtgagctgtgcrtgtcagacgagcagagggaagacggcagccactctcatgtcaaatcccagcrtcttttgggaggcagcttcccttttttagtttagtttgttggaagaaaagaattgtccytttccccsctctaaactawaarccttgccagcccaggtgggcagcaccgaggtccctgcagggaacgtgcaaggggaaccctgcagtttcccgctcacatgcccttccgagactgagtgctccgaggactgaggacgagaaatatgccaggtctgccactgccttcttacgagacccggacccaggggaggcacagccatgcccagmtcctgcctgccagttctgtcctcccagctgccctactttcatgctgggacctccaattcagtacaaagggagacctcactgtttctgaaccatctctactcagactcccaagtgccacgtgcccaggggactgttctgtgacaaacttatacacaacttcaccctattctcctaagaacaaccgcagaataggcctttcaggatgagtgggaggacagccgagggcagggatgtgctagtgtwaggtcgaggcagagggtgggctgctgtcatggaaagaccccaggtaactgcgtcacacacaaatttgtgtccttctcccacaamgggctctcccgagttctctgtcatctgcacggccctgtgagcagraggggaaacagagggctcacccctgyccccaaggcccagtgtgcaaatccattcatcacaacgaggttgtgtgagtctccccagtagcaagggctgctgaggaatggagccctcgtttccggggcctgcgtggcccactctgtattctatgactgtgatgggggagggtgggggccacaggacagctggtgggctctgccatggctggggctagacatggattaaaaagtgagtatgagcaggggcctctaggagtggtgggatagtgcggtggtggccacatgtcattctacgtgcgtccaaacctacagaatgtaaaacaccaggagggagactcaaagaaaactatcaactttgagtgctgaggacrtgtcagtgtaggttcgtcagttgcaacaaatgggccacgctggtgtgagatgttgatcacgggggaggctgtgtagtgggggacaagagttatatgggaactttctgtactttctgctcgattttgctgtgaayctaaagtcactctaaaaaataacatctcttaaattttttaaaaagtgagtgtgtcaaaccacagcctttgggtcaggacagttctaggtttgagttgacctggcaggtaccagtggcttatgtcccttaaggtgacagatgcaaaacccccggtttggtgcctggcatgttgtgtgtcttgcaggtggcggttagggctgcctcagtgaactcaaatggctgcattttacaggagaaatatttgagccacacttgmggtcctgtggccaggagaatgcagagtggcctggggggggccaaggaaggaggctgaggcagggcgaggggcaggatctgggcctttggtgtctgccagccctcattcctgcccctgtcttgggtgaytcttccctccctgtctcctgtctggatttcagggaagatgaagggcttctccctgctggccgagccccaggagttctgggtggacaacagcacctcagtgtctgttcccatgctctctggcatgggcaccttccagcactggagtgacatccaggacaacttctcggtgactcaagtgcccttcactgagagcgcctgyctgctgctgatccagcctcactatgcctctgacctggacaaggtggagggtctcactttccagcaaaactccctcaactggatgaagaaactrtctccccggtaggagcctcccggtctcccctggaatgtgggagccacactgtcctgcccaggctgggggcggggtggggagtagacacacctgagctgagccttgggtgcagagcagggcagggcygyggtggcayggggctgggcaggcggcctgtgtgtctgtctaccagtcctcyatccagccagcacccagctctccagttagtgtctgtctttcaagtgcaggcaaggtaaaggaggagaggaagaatgctttttctacacttacacttgcctggtagttttggagggggagaaaacattgcaatccgccctctgagagaggaccattttggtcccacacctgacacacagcacacctgtgacatccaagagcttcttggaactgacttgccaggagggttcggacttcgcgtgagcgggggtggggccttctcagggagcgtcccttgactccagaacgcccttgctggcggctggcggctgggtggggataggtgttgttagctcctctttcctgctgcaattcctttccacagagccctggactcaaactacacatcaccccagatcatcgaggcctggaaatctgctcccagaggcaggcattgagtgacacgatggcttgacatcaactctgggtgttttttatgttttaaaaattgtgatggtaaaatatacrtaacaaaatttgccatcgtaaccattttcgagtgcacagttcagtggtactaggcccattyacactgttgtgcagccatcacccccgtccatctccatttatcttctcaacttcccaaactgaagctctgtcctgctgaaacactaactctccatttccccttccccttggccccggcaaccaccacgatgtcctcgaggttcacccatgttgtagcacatgtcagaatgtccttccttttgaaggctgaataatattccattgcatgtggttaccaccttttgtgtatccactcatccatcgatggacacgtgggttgcttccacctttgagctgctgtgaatagtgcagtgtaccctgtaaacatgggtgtactgtcagctcttataagtgcttgatacatcactggaaatgtccatgggctctgaaggatgccaaaagatggaagaggctctatacgaagatcaatcgagttgacatagcaacgtgtccagcacgaggttgacactgtaccctcctgcctctctccttttcatgggtgtcatgtcatcaagaacactgctgtggcagtagtaagacacagtgcattatttcagagaatagcatttaaaaattacccaagtaacacaccttcaatgcagccaacctaaaaacagaatgcaccaaaggacaaccattcctaggtcctcatcggtaaatcttctatgtccctcacatagtattgcaaatgacaygaaggatttttattgtaggttttgctgaaattttccccaagggggaggatgacttagttgggtgatgggggkagcaaacatccctgtcgtcagggttgggtgcaaggagcataagcctgcctggcctctgggagagccctcactgtgtggcctggagccttcctaactgtgcrtcatctccccaggaccatccacctgaccatgccccaactggygctgcaaggatcttatgacmtgcaggacctgctcgcccaggctgagctgcccgccattctgcacaccgagctgaacctgcaaaaattgagcaatgaccgcatcagggtgggggaggtatgtgtgagcctgtgtctgtgcctgacctgggttccaagtgtgcacagggtgggaggcatggatgtaagggacacagaggaggctatgggtggggccagcagggcaagagggagcrgagagtagggccaaaggtgggagagaagtagccagagcattctggggccttccaggtgcagagcagcaaatccctccccatccctgctgtgcctcctcctgctaggtgtgtgttccatggtcctgcttggccttgccttgcctcagggtcctccagggttcctatagtggagttgaaaccgggatgaagacagcaagcacccctggacctggtgccctgggcccagccccttcttcagggaaatgctgagcagcagacagaatgtccccctgccatgtggcaccatgcacatctgcagctaccaaggatgtgccttgatgttctgggccctgtgctcmgtgctggggagaaagtgggagttcttacgggggccagcgggaagagccctctgtgctaagttagctaagccctggcactggtgggccatggccaagggagccaggaattctgcctgggacatcagggcagaatgtgaagatgggaggatgtaaggggtgtgttagggaggagccggcatgtgagtttggccattgtggccaattaacggtcatctacacacagacacacccttgcctacactgaggggcaggcatacactgtgcatcctcctggcaggctggaaaatgtccccctccaggacagtgcacagcacagaggtcctgagcccaccccggccctctagccctcagcaccctgggtcacccagtgcgccctcagaatgatcctgatgtctgctgctttgcaggtgctgaacagcattttttttgagcttgaagcggatgagagagagcccacagagtctacccaacagcttaacaagcctgaggtcttggaggtgaccctgaaccgcccattcctgtttgctgtgtatgatcaaagcgccactgccctgcacttcctgggccgcgtggccaacccgctgagcacagcatgaggccagggccccagaacacagtgcctggcaaggcctctgyccctggcctttgaggcaaaggccagcagcagataacaaccccggacaaatcagcgatgtgtcacccccagtctcccaccttttcttctaatgagtcgactttgagctggaaagcagcsgtttctccytggtctaagtgtgctgyatkkagtgagcagtagaagcctgcagcggcacaaatgcacctcccagtttgctgggtttattttagagaatgggggtggggaggcaagaaccagtgtttagcgcgggactactgttccaaaaagaattccarccgaccagcttgtttgtgaaamaaaaaagtgttcccttttcaagttgagaacaaaaattgggttttaaaattaaagtatacatttttgcattgccttcggtttgtakttagtgtcttgaatgtaagaacatgacctccgtgtagtgtctgtaataccttagttttttccacagatgcttgtgatttttgaacaatacgtgaaagatgcaagcacctgaatttctgtttgaatgcggaacmatagctggttatttctcccttgtgttagtaataaacgtcttgccacaataagcctccaaaaattttatctttyatttagcagccaaacagatgtatacaattcagcagatagactgtgcaaacgaaagtgctttcctggactttggatggaatttccatgggaggtctgagccagtacttagcagtcctttgaagttttaggtgatgcttttctcyggacacttccattggtaagcagtggtggccatctgtgtgatggacagggggcgggaagagggtgacagggaaggccccataccccatgtggcacctgggaaaggaaccaggcagatgggacttcttccgtcctggtgacacagggccagactgctgctggtattgtgccccgggagtggaaggtagagaaataaatcttcacaaataaatatttgcaattttcccccatctgttgagtgcctctgcctgctcctcctcgatgggattaggcccacagttcggaatcttggggagagccaaggaagcrgtaggcacccagtaggcccacggccgtcggctgatagcaatggtgatgctgtcctacctacttgtgtaaggcattcgatcttcctcccttccatacatattgaaataaataagccgcgcaatgtgttagctattgmtcagaactaaagtgaagtcagccacggggattacaaatctcggcttctcccctcatgttcctgagagtcttcccctggttttgaacacatctccctagctcgatgtcaaggtgagggattctgtcggcaacagcagtgcccttagttgcttcgtcgtaactccccgtcaccggttttattcagttaccttccagtcccactctcagagcttcctggcttgttctgctctcaaagygggtagagctggcacacatggactctccgaaacggctgcaagatgccaagtttctcggaagaactggaagcacagagaccagaagtgccttaaggtctcgctattcagtgtggcgcttagaccggcagtgkcggcagctgccctgggagcttgttagaatgtggcttctcacgcccctcctggacctacagagtcagaatctgcagttttacaggaggtccargcttggaagttgctcgtagagacctgagacagcrcagccacgtgctggaaacaaagcatttaagtttgtgactttattttaaaaggcagcaggcagtcgacaaaccaatttcttctacttagaggcggcttcggcttctggaagtcgctaggagtataaagttgccaacyagcgctgttctcccgctgttttctgtgcacttataaatgggaagttaggtcaggatagatctctcagctattacaaggatacaaaatacgaacattctacaagttacttaacacacacacacacacacacacacacacacacacacaaaattaattccacaggtcagtttctctgaaacattttttcactaaattctaagtcttcctggagttgcaagtgcctatctcctagacaaggcaattactcaccaactaaaatcactgtcaatctgagatttcggctgggcatgagaccatggtcaggggatgctttgaacagcctctgaggaaattagtgagyttgaaaaatggaaagatttttattactcacttggcagtaaaacctgatggggacagacgtcaggctgtttaagatcctcagaagaaaaagttgatagtgtgaatattcctaaatttgccacacgaagatgtacatgtgattataaggtgctgttgcagaagcccctgggggtgttatgggatatacactatatgggccactttaccttcctaaaatctgaaaaacttcaactactgaaacatggactgaaggttttgaatagtggatggtgaatttgaataccatcccgtgtgatttttttttctagcagactttagttttttagagcagttttaagcccacaccaaaactgagaggaagatacagcaatttctcatataccccctactaccttccagtctcccccattattgacatcccccaccsagagtggtccatttcttacaacccacgaacctacattgacacatcattattactcaacgtccatagtttacattagggttggctcttggtgttgtacattctatgggtttagacaattttcaggagtttcactgacctgaaaatcctctgtgtccctcctattcacccctccttccctcctaaccactggtaaccaccgatcctattcccrtcttctccatagttttgcctttcccacccaggatgtcatatagtggaatcattcagtatgtggcctttccagattagcctctttcacttagtaatgtgcatttaagtttcctccatgtcttttcatgatcgctcatttcttttttattgctaaatactatgccactgtctggatgtgtcacagtttatttattcacctactgaaggacatcttgcttgtttccaagttgtggcaattgcgaattaagctgctacagacacccatgtgtgggtttttgtgtggacatgtttaccccacacaatttttaaagttgctcaatgatcagagatgttctgagtgactctgatagacccacaaacatgtcagtgactctatcccttcaagagagtaagggtctcagggcccacacccctgaacttgagtaacctcattcttctgttaagttagctggagccaggagaggagtttatgactaagtcctcaaaagccaacacaacagaaacaaaaattgaaaactggcactaagtaaactaaagagcttctgcacagcaaaagaaactaccaacagaggaaacagatgaactaaagaatgggagaaaatattagtaactatgcatccaacaaaggtctaggatctagaatccataaggaacttaaacaaatcaacaagtaaaaacaaccccattaaaaagtgggcaaaggacatgaacagacacctctcaaaagaagacacacaagcggccaacaaatttgaaaaaatgttcaacatcactaatgatcagagagatgaaaatcaaaaccacagtgagataccatctcacaccagtcagaatgcctgctattaaaaaatcaaaggaacaaaagatgctggtgaggctgaggagaaaaggaaacacacacactgttgctgggattgtaaattagttcagcccctgtataaagcagtttggagatttctcaaagaacaaaaaaacagcattaccattgacccagcaatcccattactgcatatacacccagaggaaaataaaccattctaccaaaaagacacatgcactcatatgtttaccacagcactattcacaatagcaaagacatggaatcaacctaggtgtctatcagtggtggactggatacagaaaatgtagatatacaccatggaatactatgcagctataacaaagaatgaaatcatgtcatttgcagcaacatacatacagccagaggccattaccctaaacaaattaatgcaggaacagaaaaccaaacaccacatgttctcacttataagggggagctaaacactaggtacacattgggccataaatataggaacaacagacactggagactctaaaaaggggaggaaaagagaaggtcaagggttggaaaattatctactcgctactatgttcactatttgggtgacgagttccactgaagcccaaatctcagcatcacacaatatattcatgtaacaaacctgcatatgtacaccctgcagctaaaatgaaaaacagaaagttacgtggagtgagtgtcatccttcgaggcttgattctatgttttgtgaggtggcttcagagcagccctttacatcgggttaatttggctccaccgcaggggccatacccccaccctccacgtctttccactctggacacacttttcccaggcccgttttgctctggggcttttttctacctgctcctttctggggattctttccttggccttgacaacctctttacacaggcgggctggtcaatacccagctccaaaagcaaagcgacgctccacagacctgtctcctctccgttactctgcacccccagttccagcctcttcagtgtccccaaactccacaccgcctcctctcagggaatgggctgggctctggatgctcctgtgcatccagagaccctccatgctagacgctgggccatcgcaggacccccacctgccccttctctctaggaccctgcactgccggcatccgacactgagcagcgctgtttcacacagtatcgattttcagttgttcaggatgggagggtcaatcaggtcccaacatgccatcaagctggattacacaagagatttaaacagtcagaatgccactctgaatttcgctctgytgtccaggctagagcgcaatggtgcgatctctgctcaccgcaatctccacctaccgcattcaagcaatcctcctgcctcagcctcccaagtagctgggaatacaagtgcccgccaccatgcccagctaatttttgtatttttagtagagacagggtttcgccatattggccaggctggtctcaaaactcctgacctgaggtgatccgctcaccttggcctcccaaagtgctgggattacaggtgtgagccacaccgcaccyggccaataatacattttagttcaagattagtgagagctaaggagaaatgagaatgctgattgttctgaaattcagtctccacatgaaaaccagctgagggttgagtggaaaatggagaaactttcgcaatcaaatgaaggtaacacttccttcactcaacaatttacagatgttcacagccatccaacacgaagcttagtggctgatcaaaagtagcaggatattttcagggtaaaaactgagactcacgggcagcaccaagaatgtctgcacatctcaaaagacagacagcgtttcctttagggcgctgaggctgaggtcttacacagagaggaggattgccaactggcaaagccctgcttttcaccaactgctcgaacggactggactgcctggctgctgayagggagggagagatccaccagatctattcagatgccatgaacagagaaaataacactgccttcaaacggggacccctaacagatcttgcttaagaatctaacagttcagcatctgcagttgatcactgcttttgagttctgagacatgaacacaccatggaggtgtccacgttgtcaatgactcagccatgctggctccaattactgcaccaccagtgctgttgctgctgttagagtgacatctagaccccagtaccagagagcttcatggttgtttcaaaagggccccgcaaaggaaaatcagcccttacctcctgcactacagagttcctgagtgaccctgcttttattccatcactaggatcattaagccatggcagcacagcttggtgactgtgcggttctcatatgggcaactccatatagcagttctagggagctgcgaggaattaccaaaaaagaccccagatgagagattggggagttcatctacagaagttccaaatcctttttttctttctctccttcctggacacacagctaaaactacagttccaggccccacgtgcctgagcgccacacactggagtgagggggaaggattttgtgctcacccaaactggggccagagccacaccctgggcgcccccatcacactcttctccctttctggtaggttgcagtggagggggagtgggctgaatggtggccttcaaaaagatatgtccacatcccatcccctggagcctgtgaatgtgaacacatttggaaaagggtccttgcagatgcaattaagcaaggaatctcaagatgcgatcatcctggattaamcaggtgagtcctgaatctgatgacagtatctctatcagtcagaargggagaaggccacgtgaagacggaggcagagactggggtgatgctgccgtagccaaggaacacctccagccacaggacgctggaggaggcgaggaatctcccctagagccytcagggggagcacggcccggctgacgccatgagtttagacttttcaaaactgtgagagaatgcacttctgttgtttccagcyaccacacttgtggtaatttgttacggcagccctagaaatgaatgcaggaggttcctccagggtgaacttggaagccataggatggagatggctgacttccagtcagcctgrgtccccgaatgacctactcatggcctccccagcagcattatagtagaacaaaaaaaacttctcctgtggctgacacccacttttgagtctgtatattagaaaaattgaaactaatgacaggtttacagtatgtaagtattatttcatctttaagctttattcaatagtaatttctccaaagcaaagcaaataaaacaca

SEQ ID NO: 9841 - DNA, 128294 bp, Homo sapiens
aaacaaaacaaaacctcagataatccctggccttcataagctatccctcccctaacacacacgctgcctttagctttttaatatcatcacctcgctctccatttccttttgttttataatgcttgtgtttctttctttcttcgtcttcctcttttttccatttttctctttggctggtctctctgcttagcattcctttcatttccttttgcatctctcttcctctaggattttagttcctcgtttctgcttgttgtttccttttctggtcacagctgccccctaatggttttcaagatcattactgctttggactagaggaaagagggaggcaaagagctagagaaggaaagttagagagaaacataaaatgtgtctttgcttttaactttgccatatcgtctcaatatctctggaagaatatgcaaaacctgcatcaatggggaagaagtgaactggaaaactaagggacaggtgtgaagtttgtacaggatactttttcgtgtaatttgaatttttaaaagatgtgtamtacttattttcttttttatttaattttgaaataaataaatagtatctgagtctggagactgaaaargagactgcctctataaatgatttcttggttgcagcaggaaagcaagcgccatgccagccccctccccatcagtgtgctcatccagatactaagggttgattggcagctcagtaaactatgtaggagtaaatatgacggaggagagtgggaactaatgactatggtgggtgtgaattaacccaccctggagtctcctcaatagcaaaaggtcagctccctgactactgcctttccatcaagactttcacgctcaaattagcagctattgccatcataatgtaacaatcacctgacatgtagatgtctaattaaggcaccataagtcacaggttacaaatttgaaaacagcaatagcaacaataaaaaaatcccttacaaatctgtgggggatttgatagggtacatatgcatgtgaatgaaggcaaggtaatgtgcactagtgggtggaagattcaagtttccaagaaaattcatctatgaatttagtaagagaatgggaattttctcttcaaaatatttctgaatgattaaaaatttcatatcgtagccctaaaatatccaattgcataacctataagtgctatgacgttacaaatacattcttggcctttggttgtgattgccaagtggaatctgtattttttatgataggctagaaaaagccttgttgaaaaatatctcctcaaaaagccctgccaagatgcctgacatactcattagcactcgctgtttgggaaaagtacccaatgcaaatactatgatgatggaatatccaytgaagccccatccatgcattaacagtttaaggataaaagagcattaatttcaacttgcttaggttggcctacagaattcagactaaagccwgttttaaatccaygagtgagaatgcgatcaggaaagagtcatagccaaaactcaaaaccagataaggttaaaaatcattcaagtcaacccatcattctgtaggtgagaaaagtggttccaaattggttaacagaattttcaaggacacccaagtagagactgaaggtccagctgccctgtcctcaaggcttctgctgcccccacctgcttctccgcggtggtctccactgacgagtggagttgaggcccgaagctgggagagcatcataaagaccctgactcctggtgagtgctctgggaaagtcatccaagagagcgtagaaagaacatgggatgatagacaataatatgaatataagctagctcttctcttccttaaccaaacagacagtgagcattttcaaatgctgccttggtaatcagaacttctgctgatactggggttcctttcttggcaaacaagtatggtaaccacagagattgataagggtgtgaatttctatgggtttctatgggaattattcagctctgrtcttttgattctgaggctgagttgtccaacatggtagctggtaagcacatgcggcaatttacatttaaatgaataaaattaaatacaacctacagttcagtgactcactcacactagccacatttccagtgcgcagtagccatgtgaacagcacagagaccaccgtccttgcagaagatttaatggagagtgctgttttaagggagagggttgactgggtctttttgatacgcttattgcctcaaaggtagaaaaattaatgtagcataggaagatcagactcatgctaaagccaggcagactggaagaagcaatagggcttctttaggttctttttccaaggattccagggaggtctgaatgaattttgcacattttgctgctgctttttaaattttgtytcataagggcccctcctaccagatccagtgtttgtgtctgaggaagaaatgagatatacacccagtatggagtgaaggagatttcaatactttatggaaatctgtaaggattccagaaacccaccaaatagaatatactagaaatatcaatttagaatagaaatgtcaaatagaaactactgggcaatattcaagtgtgctggaaaaaaaaaaagttgattgtttaaaaggcgagtaagaaaaaaaaaaaaacccttagtgaccagaaacctggactttgacatcaaacaaaagagagaataataaattaggacctattccattttaactgaagctttgcttctgagacagatgtagctaaaccttaactagggcagtgtgttaaattacagattaagatgcaattatgccttagatctttccttttcagggtgagagcttattgatgttagggctccgataaggggaagcaccatgtgacacgtgatatctattgtggaagcatgaaacttctggagcttttagatcctgtgttcccgagaggcaagacctaaatctctgtcttgctcgcatacctctggcatagtcatgcatccatgaacatttcgtaagtacagtgggatgaacacagatggaaaagcatacctgaaacgaacctctagtaaccaccaatggttgagtgggctggtgatgaaaggtctggctccagctcataaacccatcagccgctactttgaacatgtccctgcaaagctcctgcctgcatgaggcgaggcttttggtgwtttcaaattggctctctgcagttgctgctaaaggtcacaggtaaatctgggaattccaccactgcagcattttcgagaacttgttcttggtggtttttccaagaaacctgaaacawctgccccatattgaaaagtacccagagaggaaatgtgaaggaatrcttgtccaggtttccttcaacggaagagcatttatggaaggctgtgtgtaaatagaacacatcagatcagaagttcccaactactggtctgtggaggctttgcatcagaatcacctaagatgtgtgttaaaaatacagattcccaaagaccactccagacccaaggaatttcacctgcaggaaaatggttcccaggratcagaatttttaacacttcctccaggtgatgctgatataccctaaggtttgggactgtctagctgggaacacttaactttccacaggggtgtggcttggtaacagctttctcttagcatcatttaccaacctgtttcatgttcccccacatcccttcccgtcaaaggaatggaatgtggagtggattatctagtattattttacaaytaaggataatgacatgaaacatcctaggtgagtcagtgatgtggccaggaatctcagcttcgctaattagctgttatctagtcagctcagtgtttttgatcwcaaacccgatttttgacactggcctttaggtaggcaggcttccctatgggccagggatgtggactcacaaaatactgaaaagcacggtgcctacctagctctttaccactatacctctggtggaaaccagaccaactgcagtcaaaccctgagatcccagtctagagggaaacaagactggcaggtctgagccagtcccagtgtgaagaatttccctaaagatttgttttccatgtggcacatgtgagatttgtgtttagytcccaagagtccttggaagtcttaggttaaaacaattctaagccctctctgggccggtggggtcttgttcagagtaggctggggagagatcggcctcactctgaatcttccctggtctgataaagcactttgaactccttggaattaaaagcaccaccagaagtgtgaccctgggtggtgttaccattatttattgagtgctgccccctagaggattgaaaaatggtctggccgcttgagtccccagggatggaaacstgagactcactctctgtccaactgcaggaaatgaggccttcactcaaggggagtgggaagtcttgcagccctggtacagaggactcccaggaagtaagtgagcgtcccctgtaggacaccgctgaaaaatgaaaagttacagtgtaggcaaccaggccaggaacaaaactgattcttacttttctctactctggaagcagcctgatggggaccttcatccctgagaccccaagaccagaagtccagggttgtcattcttatggttctccagtgggcttaggtttaccttttctctcttctttccccctttcacagtgcccttcacctaaaccctggctacattattctcacaaacaggagtctcccacattgggcactggcaaaaatggtttggcatgcctggtgagtggtggggagaggtgatattaaatggccctctctattcagggactgtcactacagatagcgttctttgtccttagattagcatctyggcartgacataaaccgggatctctgcttaaggttaataatccaaactrctcttttactttgttaaatatttaaggcttggagtcattctttacaattgagctttaaagaggagaaatgtaaatctggagtttttaataatgtggatgtgctctcaagcctagaaaggaaggaagaaggaaggaaaggagggaggaagaggaaggagggaggcaaagagggaatgaaaggtagcatttaggctagccaagagacatgctccctggaagaactcagaggcctctgtgctgtgcctttcccaaccaggcatctgagattaacagtgtgatactcarcctgtggatttccactctaaaatcccgcsccaccccccaacacagcttggctcaactatttgcaaatcayttctgattcaattttgttttggttatctcagtgtaaataacagttaagtgggagttacagatttttcaaacactaaaagtgataaagctaatgggcaagtccagataaggagggaarccacccagaagaatccacaagtacaagccaagaagaaaatgggtartcaggtgtgtgtttctcgtcaccgaaactgtatttttcttaatctacagaaaattttactttcttaatttaaaaaaaatcttaatctgtaaatatttttctgaattttcttatttttcatatacctcttttgtggcagaaaaggtgtacatgtgcagggtgtaattyaggctgtttctgttgcagtctttatgataatgtagtaataggtgtctggtgaagcaagacagtttggaatccacaaagccatcctcagaaacaaagatacaagtgtttccccaactgttagcttgcagttccctctaaayagttttcacgcctccatttaaaaatagttggcataatgatgttttctttctctaggctttgtgaccacgtttccatgggggaaaatgtgaatagacgtagttacagtascatttggatgagacgccttcaagcacctatactttttcgggggaacttgatggaatccaatttaattacctgaagaaattatttgctgaagaaagtctttcctctttttagggtagttacagttaaaggcgcaggggtaacgaaatcctaacccagagaggagcagagcatgtttgggacataacaaaggatctgagtagtaaacgcagcgagtgtttggggttttattcagaccgggctgacggtgtgtgtcgccgccacgcaccgctgcctgttcgaacgcatggctgagctgccgaccggctcgctaccccaaacaccgtacgccacccaactcctcttgtaacgccatcgcgcgtggcattgtgttgggttctgcgtgtgtggcatcggagtcgtggaatttagggggaacaaggcttttccccccgtccccccggggtctcccttgggtgggggcgacacggccaagggcggcgcgccctgggggtgcccgggggcgcttcttccccagggcgttacgcaccggcggcccggcgcggaggtgcgcgggggcgatcgggagatgcggggcgggcgaggggtggtgggatgggcgccgccttaacttcgatcctgcggcggcccgagagaagccgtcgccgccccgcccgagctgggtgccgcggcactctgctctgcgccgcgcgtctccgcggctgcctctttaatcaggaacacagaaggggcgggccctgagccggcgcgtaatcggatagctctgccgcggctctgacatccacatgctgctcggcctgaaaaggcagtggggagccggaggggaggcagagatcgcgagcgaggcaccagcctgcagccggcccccagcacatcctcagccgcacagacactcggcgaggtggaggtgagggcgggcgccagcgaactcggagaggggctcgctcactcccaggcgatcccagccgccaccgccgccgcaccagcagcagcaacagcagcagcagcttccttcctcagactcccctcgagaggctggccaagcgggtgtagccgttgggggaggctcccgccgggggaacccggcgaggacaagagcagggcggccgccttccactcgggctgtccggcggcggctgcctccgcccgygtgtccgtcaagggtgccgcgggatgtgtgtcagtttacgcctctgagatcacacagctgcctggggsccgtgtgatgcccaaggcaagtcttggttttaattattattattatcattattgttacgcttggctttcgggaaatactcgtgatatttgtaggataaaggaaatgacactttgaggaactggagagaacatatatgcgttttgtttttaagaggaaaaccgtgttctcttcccggcttgttccctctttgctgatttcaggagctactctcctcctggtgaggtggaaattccagcaagaatagaggtgaagacaagccaccaggactcaggagggaaacgctgaccattagaaacctctgcataagacgttgtaaggaggaaaataaaagagagaaaaacacaaagatttaaacaagaaacctacgaacccagctctggaaagagccacyttctccaaaatggatatgtttcctctcacctgggttttcttagccctctacttttcaagacaccaagtgagaggccaaccaggtaagccactgaaagtttttctatttattgcaacatggtttcccctttaaaagtgaccgctaaagcaggaaggccacgcagaacggcacagaagaaggctccctcagtactcaataatttaaagagagatcccagccggcccttcctacaccaccacggctgctaaaacccaactttcctctcctgctaggagtgtgtgtgtgtgtgtgtgtgtgtgtgtgtgagtgtgttttgaaacagaatttggcggtgttcatatgtcacatatggactgaatcaaaggtttaaaaatactacaaagcctttgcattacagtttttgggaattttttttccctgtcttgaagcagaacacayctcccttgagtttctccaactagccagtgaaatataaatcatttgcattccctccacttagctacattgagcaatgttaactgaagggcttgggaaagacaagagtttagttttggttttcagatgctgtagattctttggagaatgactggttatgcttcagaatcataaggctcaggctggtggagcaagttggcttgtggctgagataggggcttggggttgggtgctgctgrcaaccaagacggttggtctcttctctcttcatccatgtgttgtctgggaaagtaaatcgtacgttcttttagaaattattattagctaaaacaaattgcaggccctcgaaggtctctcactcttgtgaagtggttagaaacttttgagtggaatttgttctcaaccactgccaaaaagggtgtgtggacaggctgctgtggagataagcatttcgaggcccagaacagtctggggaccgcatttgtggggagcggcaaggggtatgctctggaaaggggaatccatggggaatgcagtggggtttgtgcttccttctcggaccactctctagagtgagcctccctacccctctgagaacagtgtctggaatctaacaacaaaactcttagcagctgctacaggtgattggagatggagaaaccatctatggaggaaatgggtgaaagaaaggcgaaaaagccttcctgaagtgccctcacccaaggcacttgcaaggcgatggcggcagtggtagagctaactctgcagcctccttggcatccccagaacatcagctagtggatcctagccttgcatctggtactgtcacccttccttctcctcacgccccccaccagcacacacacsactttaagcttgggcatttatttgaggggggaagaaaattcaggaatgcctttgccacccagatccgcacgtttgcagctctttctttgccataagtggtcttcagggcagctgcaaatcctgccaaagggatgggtgggggtcccacttggggagattttytgggcctccsccgttcccccttgccttatttytaaattcccagcttgaagcggaattaaattaccactcacagacctggatgctgcgtaaattatgtatgtttgtgtgattcgctgtgtgtgtgtgcacacgcgcgcgcgccgtgaggatgcccacagtatattatgtattcagacacggactccagtaggccccagcgcgcgagcgcgcacacactggcactcacactggcgcgcacacacatgcaacttcaggttccgtgtgctgtgcggagcgggaggggtcgtgaagactcaggggccatctcctaccccagatgttcgcacatctgtccccgagcgctgcttggagtgtgtgtacgtgtgtgcgcgacacccgcttggacccactcccgctctgccacctgcctgccgcgctctctgcagaaccccctcccatcccaatccccagcagtgctgcgtcacttccagagaagcccagaggcgcggagttcggggcaacctcggacccggggtgggatctcagggtgggattcgaagctgggacctgccagggacctccagctccccaaaatgcgatctcaagccgtgagctgctcaggctttcaggcggagcaaagcactggcaccctgggagccggcagcgggtggccagggcgaggccaagcyacacctctgactcacccggtgtgcgccggccgggaagggggcctggttcagccgccgccgccggcgacgagaaccaattctgggaaggagcaagatggggcagaaggtgcgcgcgggggagcaactgagcaaataacamggcggtcgcggcgcgcggcaccttgggctggcgcgtggctgggaggccgcatgggcgacgcgcaccaggctgcccctctcctcactgcgccgcctcgccagaccgcagtgcagccgctagcctgcctccctccctgccccgggcgcccccgccagtcccctgcgctycgctctgcgcggcaggctcgccgcgacccctagagagacggctttgagtggcgggaggccgaggccggctggcttgggaatccaagcgctggcccaactaggtgagaggaaactggggtgggatttcggagaggagggcggagagaggcgggaaggaaccagcttgagccccaggaatgcgcgcaacttgcacagcctctagaagcgccgcgcgcccagcgcccgccggtgcgcaggaacaggtgaagagcacgcggcgtgcggccatccacgtggtggggacgtgatagcccctcagctctcctcctagccctccctccccttccccgccccccagcgccttctctaacgccgcatcgatttgtttgggctacgcagcagaaacagagcccagcgatccataaacattctattaagcaaaaatattcccagcgaaagcaaaaccgaggctgaagcctccgcgaagttggccgcctccaactactccatgcttgtgccctcctcctcctcctcctcctaaggacacccccagggaaaagcctgcggcatttcttcaacgctgccctatgccggaaagttaggtctcggctgcagcgctggtctctggagaagcctctgcctgcagccgccggcgagttcccgcctcccctccccagccgcctcgctctttgcttttccacgtgagaaaaagaaatgttcacggccgatgcttcattttcactgattgatttctttttaatatcaacacaagttaatggaggcaaggcgcgctctgattgaagggctgcccccgcccttcgactcgggctggctgtgccgggggtctttcccaccgggtcgcaggcgtccagcggctgggtggcgggcgccggtagccctagtgtttggaggtgggggagggatttggaatagacttgtcgcccctctgggaatcatctgggttggggaaccttcgggaatcagctttccagaccaagttttaggggatcttgcccatatgcgttgcggcttctgcggctccggctgaatttcttctaaaagataggagatccacgctcaggtttattggcgtgtgctccctgctcggctcccctccctccacttcctgttctttcggtttcagasagagaggagagccccctggcgctagccattcccgatcagcgcccactacgaacgtcccctttgctagagttaatcatgatctgcggggggactgggttttgctcagaaaatcattcaagtcctgacaatgggtttcttcaaatggtggcaactcccaggcctaatgtccccacctccgggacacatcgcttggggccaaaagaacccagaccccataaccatctacccctcccctcctcgtctggagagctttgatctatgcttgggttttaacgccattgccatggacacgcgcagattctcggtcaattcacccttccgtctggactggatgatcagataagaggtgtaaattggctgtgggagacaggtctgggttcagacaaatcctgaaagagaagcaatgayggtctaggcgccggataagggtttgaagtgtttcttttagcctgtctccccaaaatgtgagatggccattggcgagcataataatttgcaagtaaactgtaaactcctagattttaygcagacggcctgctctgggctctagggattggtctcatgcccacattaaatgggtacccagtaaacatttcccccgtgatcagctcctggaggtagggaagctgtggccagttgccagcagagcacacagtgcaagacagtggcaaraggagcactccccaaagggccccgggcaggcccctactcgtccaagcggtgcctggtggaattgtgaatgcgccagtgcacatcaggtttggagttttatgtcatcccatagagccctcagacattaagctacggagcactcaactggcaaaatgaaagattggaaggctgcagtgactggaacccaggctacccagacaggactcctgctgtctaccaaatggctctgatcccctgctgttgaatgtatcaagtccacgttctgcagcagaaaggccagttcctatcttccaggcatagaaaaagctaggaatccaaatgccaattcatatgcagtgaggcacgaatacaaatgacagtgagggaggggtctggggtcagtgaggagagacaycagggaccagatgattctggggaccctggtgtttttcatttcactcaagtcttccctaaagcaatcaggaaaatgaactgactcaggrtgacctgagtgtaagacaattctgagttgacagaattcaagagccaggtaaagaggtttccaaatatattctccaaaggtccagtttggaaagactttaggaacttgagctgagatcttcctttcttaaaagatagagcaaaagaagaatatctttttaatttcttgaactgacaagaaaggacttgaaaagtgtcatctgggcaatggcttgtagtgtyattaacatatttgaggtattttattatctgaccatcacttgcaactggataatctttgagataccttccttgagtggcagataagtatattgatcaccagaagttagtctttgtactgttccttccaggtaaggacttggctgtttgctgatttttgttttttaattaacccatttctggaagatgctgcagaagtttgtcctggagagctacagtatttttcaaagctttatctgccttgatgagaaatggtcagaggcttaatggtttcattgcctaacaggattcagtggagtaggattccaggacacagtggccttgtatcatggctggccytccaggagaaagcatcttctaaaggtttaggaagctgtcaagtttagataaggctgagctccgatcctctgggaccttggttgtattaataaggagaaattaatttttaaccactgggaacattgccaaattatgtgacctttggcagaccagctgtgctataaaaataaatyccccatttctgaaaatgctactcctatccagtagaacaataacaatgtggcatttaggatagagaagagtaggattgagaagaaaggagagaaakaggagttggcaaaaaacaaaaaaacaaaacaaaacaaaaaaaacaaaaaaacccttcgatgttgtgatacatggtttcagacctgaacttcctatccatcacccgccctccccggccccatgcctagggtttccagaacacaggaaagagggccaggatgacaaggagctgagtgcctgtgtgtacagggagtggagaaggtgttaagtgcttccagcccactcacaccccagcctcaaacacatctctcattgttcacacagacagagtactggcacaggcagagaaaagggggttttcaaacaggcaaaatatttgtctttccctaaatgctaccaagtaggtttgccactgagaagttttgtggggatcatccctggccttcccagcttctgaaacatgggaactagactgcctgggtttagaatctagctcagccacttgctggctctgtgatcccagtatcctgtgtgatcagatacttagtctatgtgcctcggtttccttgtctgtaaatgtgtttggtaacaatacctacttcatagggttgttgggctatgtcarattatgtagaatactgtttggcacatatgaagcccattctgaagtcactgaatctttaaaactgtttcagtggggttagtggaatctcgtgatcgtagaaagcacactataaccattgtggtaagttgatttttatgagatttaaaaaataattcttattctcagttcttccaccaccaaacctctgtgttttgtaagcaccatattatctctcgccatgctcttcttcagagaatattctctgctgagttcttatcttagatttatgtctcccttgcattttttccctccttcttcctctgttttcagtattcttacctcctattttctttttaatctctcatttcctttccttttcctccccttccatccttcaacactgagagtgtgctcagcagrgaacaccgygtttaaggcgctctcccgaatrtgtaataacttctactctggcactaaggcccttcagcagctgaactcaaaaaagtcatcataaagacaaaatagcttttacccagcaagggtcttaataatcccatttccctctgggtcttcataaaggagtcattatctaatccagaaaaaaaggaggggctgggaataacaaaagagaagctctcggtagcacagagtgcacgaggctgccggccagctgagtgcacgtggccgtggtaccctgctcccgcctccacaaatcctgcgataaccagtaaccagttctggcragtctttcagcagagaagataatgggaattgcaaattactagaccgaatgctaataataattgtttggatacaggagaaaaaataaaacagatgttccccaaaggcattctaggggctacagaaaggaaaatgaggagggggttgagtaaagagaggtttgctgaaaccaagcacaagaaaatccaataccaacaaatggcttagtgatgaagtaatagtcagcatcttcctggtggtacagataaccaatatttaaagttgcctttggaagtgtgggggttggagtgaaggggacaaaacccctgagataaattaattttactagtattaaaawtaaaatggcyragcatggtggctcatgcctgtaatcccagcactttgggagraggaggtgggcagatcacctgaggtcaggagttcgagaccagcctggccaacatagcaagaccccatccctgctaaaaatacacacacacacacacacacacacacacacacacacacacacaatagctgggtatggtggtgggcgcctataatcccagctacttgggaggctaaggcaggaaaatcgcttaaacttgggaggcggaggttgcagtgggccgagattgtgccactgcactctagcctgggtgacagagtgagactctgtctcaaaaaataaaataaaataaaataaaatgtgaatgtgctttgaaatttatcattattatctgctttagggtgttctaggagacatagttcgcactaactctaccttgacctacttgtgactaggtattattatcccagacaagttattcaaactctcaattcaccactaagaaacatttgcacttaataacagctgggggtggggagggaagcgcagtagctgtggccgcagaataatttctgatagaactctcagagtctgtcctatctagtgatacctttgatgttcctttggtcacttmttaattggttaattcaccaaatcttgatgagtctgacttttgggaaaggttctggtttgatcctgtaagacttgccaaaratggatcagcaaggagtcatgacctcaagttgctggtggctcagtagactggatgaggccctccagaactctcacacatctcagaagatgctaaagagcttcagcctctcagatgcacagaggagaaagaccactcccagtatgggagaggagaaagggcagaggcagcctggagtgagagagtaggtgggatttagagcagggaagggcataccaggggaaggggaaggtgtgagtagagaaatggatgctgggttggtttggggaacactcagaagctgcagtttagaatgtatggtgggaaataattgcaaacaagattakaaataatagcttgggctcaattcaaggcccaaattgctaggcaaagaggtttgggtttcacttgctaaccaatggggagccattaatgtttcaacataagcttcagttaatcaaaataaatgaagacaatattatattacttttttttctcctttggtttttggagagacctcaaaattattcttctgtttccttccccaaatgtctcctaaaatggtcaggaattgtaatcccagatctctcatcaatggcatcaaaattgcatttgcaatgagggctggaaaagagaggacataaatataaactaatgacattatatcggctgccctattggaattgcatttgtttatgatataagatgacaaataataaggttaacacaggtggcatgattcgaggtcaggagaggtaatcgcatcaaacttacattttaccgattaaatgaggcttcatttttagaatctagattgaggggagagatgttcaaaaggcyccatttccagacccaatttccagttctctcctaagtgaattcattggaggtgttttaagagagggaatttgcttcattctttattcatttccaaactcatatgctggcttcctctcctgctctctgcttccctctctccttccctcctagatggcccttttattcagattttgaactttatcatttcaaaagttcagaaggatttccatttgctgtgccttcaggagtgcatcattcactgccaccagtctccataaattgagtagattgcatcccttcccagttgccttaggaagtggtcaaacagccacattcctgggctgatggattggctcatttcttcccagcttaagccaagatacagattttatgagactgtcttgtgacaggctgaagttgctttgaataaaacaaaatccagcctcagctcacagaaataattcttaaaacgcagcttatcccgggttggtgagcaaaatttggttaaaaccctgagccaacgacttagatgatctgggtgagggatttgaagaaactccttttggtttttcttttcatgcatcactgttgttgacatgctcacacacagaactgtgtatccataatatttataaatatgcagccacagactcagttacaaaaagaaactcgtgttagtagacctgatgtgattaaaggagacatttgaactctccgtaatgcaagacagacatgttttctgaagaatcctggagtttggtttcaggcttaccaagcagatagaacaggggtagcaccttgagtaaatgtcttattgtctaggagggtagagaatcttttgaattyttggctcaatctrtgggttataagatctattccccacctcactacatgggctttggattttagcactggaactgacctttagaatcacccctctcattctatagatgagaaaacaaaggctcagagttgtctactagcttacccaaggtcacacagcttgctagtggtgagactagacttgattactaggcttttaaatcctgctccaatgctatttctaataaacttcctggtggagtaagtggcaaggtgacaacctcctttctttttaagtagaagaaagagtttcttctttgccttgctaccaataattaaatgaaaacaatgctgtggaaatagggacaaagtgggattatgctgtagataagaaataaattataaagtagataaagtatattattttcagaggaaatgagaccgattgcttttctccactaagtgccctcaggtatacataggaaatagatgtctcctagtcatctgctctttctcttttccatagcattttaaagtaacagggaatggagatgccccatttagagggtttcaaaccatgttccaggaagccccagtggacttgcagagaagcccttctgagctgagggcaggaactaggaggcctggacactacaatgcttctggctacctccctcccagcatccaagaagagctcccttttatgttctttgtacatgggaggtctaggtagagttttgttcaagaaaaaaaaaaagtacttcaaaaaaarcaaataaatttgaaagctacacacctaattcagtccattctttgaattacagtttgtgaagctgagccccagaaaggtcaaattgagtgagttaagagttgggtgccatctcccatctttctgctaatgtcgatccctccctttcctggtaacccagtcccatcamcccagactcaccttttacaacaactgggccctctaatcccacattcagccaatggccaagtttccctggtttygccaaggactttttccttcagttcaactaaagcgagggatctgattggtcttttaccaagctgtcgtgaagtaagctatagtaatcagattatctgctacagtcaggcttcagtatttagcaaatattattgtcaagttcaggttatccagtgttcctttaaaacaatgccaactacatttttctagaaggcagaccagatttttaaaagatcttcttttcccattcttaatacttcttaaaaattaaatattcgcaaggaaagtgattgggttctgtaggaaggtgagttcctaagtgaaggggtacaacatccytttgccttttcagggctatgttacccctaggcagaggcagatggtacttagactaccagcaaaacaacaatacttaagaaggagaaaaagagcaagacagaaagagtttaaaacaatctgatattttacatttcaaataaaaacacctaagtagtacttataagaggaaaatcagaacttggtgacttcagaacttagtgttctctttatttccaattacatctggagctgtcactttattcctttcagccttgggcctttctcagacctgacctggctcatccctcagccttccctcccaggtataggagaaaatgctctaacagtccaagcctggattttgctatctctcttcgggtgatgaatttgccccaggtgaaaggtattcacaaaatagttgcagaatgaagtcttttgtcaactcacccagcgggctcagtagctcaaacagggtcaatttcccctctgtacatggagattggccttaagggttttgcccttgagttcaactctcctttggcttagcttgactcctctgaaacagaacagcaaccatgtataaagttcattgtggaacacaataaagacctacaaagtaatggatggtatagctcttcagaagaaattttagctaatttctattgggacatgtttgtatttaggaaatgatgtgtccccaaccctagaaaggaaagatcagttatcaagaggagaagtagaatgattaagtgtgttttctttacaatttttactgatatgtttcaagaattctgttctctccaagaaaaataaaaacagaaattctagtatttatctttgtggatatatgtttgtgcaaatgatgtgtgatattttatgagaaggtgtgaacgtatgtataggactaaagtgtgaattactgatatgtatatgtacttgaagtatgttcaatatctatgtttgtgtgtgtttctgggtgtgaatgcaagccaaacaagaatgtgaatttataaatttgtaagtattgaaaaggttaccaacacacaactgaagcagatgttctaatgagttctctgatacttcaataactgccctgattttctccaggtaaagaaaggatagaaaaaaagcaatggatgactcctttttcttttggtttaacagcagacagtacagactatcagctatgggatatatatatagtttaatttttttgtgtggtggtggtgaagaaatgatcacttctgctgtagatgagaaattaaaccttcctgcgaagaagtttcctgtctttattgctgatctgtgtgcctggtctaattactaaaagtttaaacctggggtgtggggaattgagggagaaaagttcccctttcaagagtaattggagagaagtagaggaagggatggggaaaggagggagasagtgtgggtagggagagtggagagtatgtggaaaccataacagttactaaacaggagctcagctcaggtttcctctgacgaattccaaggcaaaaaagtgtggtttggggtgagttggtggcagggctgcagttttctgcaaaatatctggcagaggagctggacccggtagaaaattcccccttctgctagttgagtaagagcagctggtgatctatgtcctcacacctctgccttctcagaggaccactccaccctatttcatgtgcataagccaggaccaacgggcctcaatttggctggctaratgacattaggttcccagcatgggtgagtggtgtgggcacctggaaagcctatgggtattggctgcagaggarctgggcctcatggctggcctcatgtggtctgggtgggagggatgagctcattgtcttcatgggctggggtgggtgcagggtcattaggtaagaagatgatgtgctgtgtaccagcctgaggaaayggctgcttttgttttccacccagtaggaaatggacctgaattcattccattctgggcagttcaatacggcacagtttgagctcgtggaggcttgatgccgaaaaggctacttgtgtggatttgtgtcccaaccacccgtgtgcagcgtgcccatcttttatgcatttaaagcctgtcaggccggtagtctaaagcagaggtctgggagatagtaatgccaacagacatggggaatagtaaagtgcacctgtagagttaaaaaatgcatgacctgttccctcaaagagtgaacacaggagaaagacccatcctggagggcggctgctgagtcgtaatacataattcacgggcccatgctgctccatgcagatggcgatattaaatcgtgattgatgctaagagacacacacatctcaggaaggtctccgagaggcttctgaatatttccatgtctcatgtgccttcccagcttctgttctactgtggtatttaagcaaaactccctatttcccaagaatccctgctggggattgcagaactttactcccgaatagatgagattcctcaaatgtcatcacccacctttggagcctttgaaggtggctcccttccctcccaggccacatgaagctgtctgcctccagccaggcactgcaggtacagggagccagcccttcctgcaaacrgcyagttatggctggacaaagcagcagcacactctggtggtggtgaccaggcaggagggacagtgggcagacagcgcagaagaaacagatgttcattcaacacaaagcacctttgtcgaaattccaaggctagagccagtagattctctaatacagatttttccattcggtgtataatgaaataataaatcaaatttgtggtatatatggaattaaatgtttggggggtttgcattttttttcttaaaaaaaaatttaaaaaggctgcaatcaccctccagggcctgttctggcccaaagctgaaagtgcttcctctgcaccacatgtaattgttaccaggctcgcttgtgggtcggcaccacaaaaccaccattgtcagttcccagagccctgactgctggctgcctgggctgggctgggagacaccgaataaaatgaaggatttatgagataaagatagagataggaggttgaatgaggagaggaagatgggccaaggaggggaggcaggaaaggcagggaggcatgttgagtttgcagtcctcttgtttttttaatcacagaccatgtaattgagaatatttatggccatgttctggaatactttcatctgtgtgtgtgtgtgtgtgtgtgtgtgtgtgtagttgggtgggtagggggagggatgagccggaataatctcttccaccgaatgagtaagtaggttagtcttctggactgccataaaaggtctgtaaaatagttttaatcagacactggtacagaagagaaggagggagtgtggggggaagaaagytgtaacatatttgaagttctttgggtygttgatttctctttcagacccaccgtgcggaggtcgtttgaattccaaagatgctggctatatcacctctcccggttacccccaggactacccctcccaccagaactgcgagtggattgtttacgcccccgaacccaaccagaagattgtcctcaacttcaaccctcactttgaaatcgagaagcacgactgcaagtaagcaccgtcctgtcccactgtgtatcccatccatgagatgcacacgccctgcccccacccctgctcttgtcacttctatcacccctcaccccaagacctgctgctaaccagtggtggatcctggccccagaggaaaacctcaaggggcattccctttccagggaaataaaggtgtggctgatcccacagtatggtggaaagagccttcttgagtgaaaagtagagaatattaacctacctccaaaggccggtagtggaggagaatttccatgtggtggcaggggctggactacaaaactctactcttgactttgggttaccttgcacttggagatctccccatttccacagctgctacatgtataaaccccacccacttccttaataagatagtagctgtatccccaagtggagacttccctcgcatccagccacgcaggatcagcctgttaccttatatagcggtaactggttttcttatagaaaaaaaaaagggtaaaaaaaaaaaaaatctaagtagttctaagattcacattggttcttgatagctgtgctacacaagtagagtctcaaartcagtgtcatggatttatttaacaaacactcttctaattgcattacaaatattaatccatttactttgcacagtgggccctgggaagttagtgccattatgatctccattttgcaaaagagagaaaaccgaagcacagagaggttaggtcagtcacccaaggtgactcagctggtcttacaacattggttctgccaccctggaaatgtgtggcttaggaactcccaagtggacayttagacacttgggagtactttagaaatgccatgttactaccgaggtccctaaaagttaaggttgggaagcaggcagcatgtctagaatgcagatgtgctttaagctgtctactgagctccatcttaaagtcttttctcattggaaataaagtgagagtttttgtgcagaaaagaatgtgccaacagtcatattctgccccaaatgagcgcctacggaatgctgttactctgataagtattcagtgctcccatgtgattcataaattgtctaagcattccttgctattaagcaaggaattgcaaatactgaaaaattaataagggggccagctggcaggacaggtaccaaggagaaggcaaaactcctacaggccaggtctgggccagcacttcctcatggaggaaacaaggcccctctttaactagtgctagactgtgaggctcagtgaattgatgtcattattatccccctagggctaatttgcacctacataatggttttctcctaacaagaggtagcctttgttgaaaaccaaagggtttcccggatgaatgcctcatgtgacgaagagtcataagatgaagtttctaatcccagatccactcttgactcaacggatgacatagggaaactcatcagttcctctttgtctaagttacatgagtaccctggatacatttgctcagcatcccaaggcttctgattccctgacagtgaactttatcaaagatttctgttagaagagcttctttataaggtgttttgggctctgattcctctggctggactgcagaaggttggcacaaatggaagcataatgtacagagagagcctgggtctaagctcagagaaatttgactaagcacctttctctactaagggccaaattctgttatgcttatgacagcaaatctcccaaggaaattgccaagaggtcatcctatgttgtattcatagtggcagagggagaaagcatggcttttggaaggaaaaacttaggagctagtaagcatggcttaaaacatgttgggaaggacgaaaggccagaaaggccctgctttgggttgcagggtaccccttccatggacaggactcagtcccagagatggggagaactgaaggttgccagagactctgacaaggggaagaagaaggcattgccccttgctggaggtggagtaggggaagccagcaatttacagggttatcttctggcttatcatcctcgctaaatcacttcctgtttttctccccattccatgacctcatgtgtctggtttgaacctaaaaagtgaaggaggtcagaaaaaaatctttctggggtctgtttctcccagtgccaaactgtcagagaggctctgttgggattaagcctcatccacttaaccttgtcattaattctctgttcctccccccatttctcccccactccccatttctctctctttctctctctcattaatttttgtatttagaaagactcatctggttttctcagcctctcactcttcaaggtatttttgacatttcccctggccatttgcatttgccataaatgggcttcccctccccactgccttgttttactttcttgtgaaaggaacaattaatctaattgaagtcctggaagttctgtcttgttccggctctccctctctcttccatactgcattttcgttccaagggagctcctgggtttggaaagcactcactctccaaggaaattagcctgctttctccttttattttgggtgcatgcttcaaattggatttggctctgcaggcccataaggtggatacttcccaaaagaaaactgcctgggctggtcttccgatcacagagcacagcagcaatgccccagcaaaaaggggaactgagcaagaaagtcaggagaagcagccaactcagctgtggagacagagcagtggtcagcacacccaacctcgtgtttgcccgggttcttcctacgtgcagggttaactgcaaagattgccccaaagcctggaaacagggccctgatatgaaagaatttatcctgggctgtggcccctgggcccttggctccctgtataccttgaactctacatcccaaaggttgagacggttgctgagtaaaccccagatagaccttttcccctaaccgttgcttattaactttgttccattgaagcttgctgtctgcttggaaaatttcactcacaagccgcagctttgcctgactcagtgcaatccaaggccaycatctctggtgaacttcccttgactcctccctccagccacttgcagaaatgcaaatcctgggcacccacaggctgtttgggggcctgtatagaagctgtgggcagaaaccagaggccactgtggtactgctggactcctgcagccaaaggacaaaagggcgagactacgggccgtctgggcaaacagagagaagccactttattccctgtggagtggaggatgctaggatgttgctgctccrgcagacagaggcctttcgcttgagtcatcagccaacagactgaatgttatggttttagaaacccatacacaaagttgagtggttttttccatttctaaaatttaaaatgtatgtatttttaaaacacccacctgcatgtaatacacagcttgttcaggagttctcaaacagccccagcacccaccccatcccagaggctcaaccaaataaaaccaaaaccaggaggctgggtccttttaagcactggtaatttctacctgtaattccagccctttgggaggccgaggcaggcaggtcacctgaggtcaggagttcgagaccagcctggtcaacatggtgaaaccccgtctctactaaaaatacaaaaaaaattagccaagcttggtggtgcgtgcctgtaatctcagctactctggaggctgaggcaggagaatcacttgaacctgggaggcagaggctgcagtgagctgagattgtgccactgcactccggcctgggtgaaagagtgagactctgtctcaaaaaaaaaaaaaaaaagaattggtaatttctagatgggtaccttgatgggtctcagaaagagcaaaacccactagcaagaaatgaaagaacatttcttaggctaaaatcctcaaggaagtctacataaatgattgtatgtgctatgttcagcccagcaatrtctcatataccacgtatcattgaagaatgacattccatttaggtgaagtgtccagatactgaaatatccacctttaaagttcttaaaagagaactttaaagagttccaagagttcttttttaaaggatttctgataaagaacattctaaatcatgtgctgcacttccctgtctttttaaaacctacattgagaggagtcaactttttctcaatgattcaggcttttaattctaagcttcacttttgtgacagcagccagtattgccataattggaacaggcagattaagatttgaatttttattgaccttttaaacttcccaggcctcagtttcctcatctgcaaagctgtcataataataaatatcttgcaagattgctctgcctttttatgtagatgcccaataagttagcaactgtgttagcatcattggactttgtcaggggacagtttgggactattttctatcaatcctcctgctttcacacatcctgttacgagtatgcctgtctcctgtagccttcccattctgacttgtttttgcttttttatggggttatcaattttgcttcaggagcccttgctgtctcttgggaagtttgagttctgggacctaagctttgctcaagccagtgcaatcccaaggccagcatttccagttggcttcagccagccaagcttgcagcagagttaggactggggagtgatccccaagtgacaaagcgtaagagcaacagaggatggagttctcaacatcagtgtagctgctcacaatctttttttctgaactcccccacaccgttatattctgcatatttaaggttttggatatttgcctctaagtgtcctagataaacaaggtgctcttgtgtttatttacagccagaggggccctctatatcttagaagatatgtctgtttctcccaaagtaagagatgatatcttagaaaggtagcagtttcccagttgataacctgatcatagtaaacagagagatcagaccagaccttagtcatctggcccctccccattcagccagcagtgtttccctgtgctcagtaaacaccctcgattccctgcaaacaaccaagcatagtcttgcatctgcatgagccccctgagttcccagggctccagccctcctttccctccctccacagtgtccagctgcaagctcccatcttcctcccctgagtttccttgcttcctgcagttcccttttatcaccctttcctctgaactcccagagcacttgatgttgcctgagtcccttgctttttgttcatatgtggtcatcttgagttctcagcaagtaaattctacaagggcacaaagcatgtacttcatatctaaactcccatggcgcctagtctaggagggtgctaggcaggtgtgtgcaggtgatttcgtgatattttttacattggaaatgccaggcaataggtcagcatgagctgaatctgtgttggaaggcagacagatctgtgttccctatttgtccctctgggaatatgacataatcttagggggtaggacacaggccaagaatgtcactaactgatttgggacatgagtctctcaccaacaaaatggtaatagaccattcattcattcatcaggaaatagctattaaacacctactatgtgctaagcacgttggtattattgggaatacagtgatgaataaatcatattcttttccctaaagtcactgttactctttccattttacagatgaagaaacttgggctcaaagaagttaagcaactggcccaaggttctactcccataagtggcagagaagggttttgaagccagataccctagttttcaatctctgctttactcttgtgctgtctgcctccccggcatcatgcatttggcaggggacatgatatggacctgttacgtgggcccacagcatccaggtccagcctaagctgggaagatcaaggaaggctccctggaggaggtgacgcctatackaattctaaagaatttggccaggcagcagggagtgtgtttggctggtgtcataggcagacagcagcatgcccaaagacaagaaggagggagggtytgatgccttcaggaaccaaaataattgaacatgcctgaacccaatttcttaaccagtgagcattgtaagggtagactaaaaggggctgtccttgtgacttgctgacacaaacccttttcccggtgaagaggtgcctgagcaatactatttaattgtatttcctggccagacaacttccaccatctccttaggagacagggtggtcaggaagcaggaaagactaagatgatggggactctctgctgtccccaccttccctgtccattgtagggtctytgcagcctcataccctatgtccagcgacctcccccaccccgccgccagtggaatgcctgaaagtggggtttggcctgggaaagtccaggtaacacttcagattaagctcctcttgtcaatttcctgctacacaagactttctgaatccaagtctctttcctatgaatagagggcgggaggccagattgcccagttggaggtgtggcttcagctggtctccgttgaagtctgaaaagccaacaaagcatagtgagaattctgtgtggttcaagagggtgccttgtgcttgttgaggagaggccgttggcttgatcactcacgacactattactgacgttattatttactgcctgcccaaccacagaaatattctgattcccctaaggagccagtgagcagtaataattttctgtattgcaacaatcctcctaatgacagaaacagatccacctccaggtacgtggtggacgaatgggagcagctggctgctggccccacacttaccaaccttgaccacagggtccacccagcaactccacctcacccatggatcrgggggaaaaacaactcacagactgttctcctcttaccaaggttaaaacgcagctggaattactttgggcagtttgtttttaaaaatgagtgttgcaattgtaactgtctcaatgcaagcttcgctgtagatgcccttcttaacaatatgctttatcttctgactgagaaaatcacttgagatgttatcatgcmcaatcccacttgttctgcctctccaccctggcaccttctccgaacccagagatcccagagggccagcatctcaccccatgtaactccatgtaattctcccatctaattacaccggctgagagtctgtcttaagaaattcagtgggagctccaggtgtggaggggataaagaagagatggaaatataccaagtgaaaacatcagatttttctaaaaagggatttgtgtattttcctggagtcatgagtcctatagaaaaaaatktatattctttttgttttgtcctttttactggcaagggatttaagcctttggattaagagaaactcaaaagataatttaattccattcttatacttctgcctggataaataattccagaaaaaaaaaaaaaaagatatcagctgcccttgtctttccttccagaaaagagcttctgtaatcgtccttcattatgggacatcgtgcctcacaactcatctcagttgattgcagagtagatggttgtatttaatttacataatcaaaatttttttcctagaaggagaatccctgaaaaatgttagctgggtcaaaataaaattttctaaaaagaagaaggaaaaggaaaaggagaaagaaatgtgagttgggcttaggtttgggagggcagcagaaaagcatgactttttttatgcctcttttcgagctttgtagccaagcatcttggcagtctctaatatttttctactttttcccactggggactcaactgtatgtttgtgggtcaygtggaggaactctcaaaattagacaacaatagcaaacatttattgaactcttgccagacatcaggtcctaccctaagttttctatgtttaaccgccacagctggtactggtactactattatcccatttaacagatgkagatactgaggccctgagagatcacacagatagtaatcgtggggctgggtttgaagccaggcagcccaaagctgcctttgtatacctgtgtcaatctgcttggagctgtcatctgctgtcccagtgcttaggtatttggggcctctctgatttctttagatatccttgacaagccttttcttttccttttctctttttattccttttctttgcctcttcctgccatgcagtcacctccggatgccagcggggcagtcaaggagagagatctctttctgtgtctttaaatacaagccagaggcctctcagtccatcgtctctctctgcctccctgtcacctacctcctactcccccaatccccccacagccccgctcaccatcctcttcaaattccctgccatcctcaccaccaccttcactctccatctggagtccaaagatgtgagggccagtaatagagtgtcagcggaagtaattgattcctcacaccgagagaattcgcctgcctttagtgtcaatggagctgaaccagagtcttggagggtgagcgagacatgtaaacagtccgtggccgagctgtcaggacgaagccagacacaccggagagtgaacgaggggggaaatggtggaacaaataattgttttattggaaaggaaaggaataaataatatttcagcccaggaactggcagtttgaaagrgatggttgagagcttggagcagaaggattcgtgatgcaggttttaatggaagagattttctttgtctcaaagtaggaggtttcgtccccacccgacccccctctcccattatcatcattattatcattaaaataattactgtaacaattacagttgatgagacctcaggtttatacagcacctttcatctaaaagttcaaagcgatttatctatgtgtcatcttttgagagtggtaggagggtaagaaactattattttggggggtcatctgctgggaaactgaggtccaagcagatacaagatttagtccaagcctcagggcaggctgctgggttaaatggtggggtactgagttatcttcttgggggccttttctgctgtactcttcactgcctgggcctttatacacacgtggctcttgaagctcatccccggcactgatgcctcctcccacactgccagggcctccactggtcgctacaatattgtggccaaccagccagaagctctgtgcgcaaaacaaacagcctgcttctggctgtgagatgaataaagatccttcaaggtctgactcacacagctcccatcctgcttagagacttcctgtaatctggttccctttcttgtagaagctcatgtcctttctaaacatctttcttcatggtcttatgaggctctagccaggagcacccaacattcctaaatgcttgcttcttccacccccaacaaaccccaacctgttctctcagaatggaaagggcatttctgggatggggagagaaggtgaatgctttaacatgcctcacatggcccgggctgcctgtgcagcatgatgcttcagaatgcagctgtcgaaagcatagtcacaaacggaagcggttccagctgactggcccctgagtgctagattcagaatctccgccctggcgtggcagcagccctttcctgcttggacattagtgcakgcccatcatttccacaccatggtgttttttgcacagtagtgacaagtttgcccctggagccaggagaagctccaagctctgtaatctgaagctccaagtaaatgaactctaaaagggaggcccatcacacctgccacctactcccaaactgtcccctacttggatttctgcatggcacgtttttcagatgagttttgcatcttccaagttttgttagggaggctggatgccagcaaagaggaatagaaaaatgatatggagcctaaatccctggaaaaacaaaaaggacttttctgttgctgtggtggattccctggtgcccagtacacttccgttcccagcaggctcccgttttttggacagacggggaagttatgatttgccctcacaattggatcccctgggagccagaattagtgtgaacacctattcsggagggaactgttcaccctgccgagtaaaggggcactgccagcacaccaggggccccagacgctgtgctctgattgcccttcagtgaccacccrtgcaggcagccccaccgggcacaaaggcatgattcctgttcccttttgtcaaatgaggccaactgaggcacacaagcatgattgatccaggccagcgtaggaaaatttagtaagtcctggccctgctgggattcacctttacacctgctagtgctgctgctgccgctgagaaaaacagaaatggaaagaaattgtggactactcttcctttgcactctggtatcattccagaatgctaccaaggggccctttaagttgactgcagagggtgaggattttatagacacagagcagaccaacgaaagacccaacactcatgctgaaagcagcctgcccccaaagccttaaacttcacattggcaccggttgcctagaaaaccattccttacataagcaaacatgtttcatccaagtggcctccagtgtgtgtgctggtccagaagcagagcagacccgtgaccacacggcctcaggaatgcgccttgctggccagccaggtcagcgagggaaatggtattcacccaaaggaccagtgcagaagttggggaggctttgttgcgtgcccttaattctctgaaagttcaccttcagagagacttatcagaygcgttgtctggagtggcctccttcctcacgtcaggaggcattcttggcagcctgctccatgaggaacaatgagattggcggggccctcaccatcatcgcagggcctttgcggaaaaagagccagcaattataaatagatgttatttgtcgtttccattttcttgccttcaaggttttttggaataattccttcagtttgttttgggttattctctccgtgtacttcctttggtgggtggtcagacttcctcctttctgaagagccatggtgaccctggttgtgaggggattgtggataagaagctcaaaatatcagcgatttgtggtgggaagaaatgaaggaagaaaatacaactgcaaacagccactattaaaaaggcgcttggtactgatgcagatacmcaaacaaatacagagtttggtaactgtttgagcccttggcgttaaatagcaaacaagaataacagcagcagtaacaacaaatggctattcatggagcatgtactgtgtgccatacactgtgctgacccattgatatgcattaactcaccagcctcttgggagcttgagcaccttgctatctaagacagcagatggaggacgggtggttttgaacatagcctgggctcagaaacacaagtttgaaataaaatctcgaaaactcaagtgtctgaaacactgttgatggatttgtgcagggggatgattttttagaaacccagccccaagaagcagggtattgagactgcctctaactgtgcttttcgtttcatcttctcctgtctggctcccaaggtgtcatgtgtgtgtaactcttctcttctccacatccaccatcctgttttgttttatgctggtaataataaaaatagccaggggctctcaggtgcttccttaaggcatctggcactgtgctgggcctgcatgtaccttcgcaatcctgccaccacccgcaaaggtggagactgttattatgtccattttgtagatgatgaaactgaaactcagagaggttaaataccttgtctgtaatcacaccatgagcaagtgccagaaagtaactgggtctgtccacaaagcccacatgctacacttcccaggttacacaacaccctcttaggtatgtttccgttaacagtaatttaacgtttcttttgtcacagaccttttccctagaaaaatgtgcctactcacaaacacaaaatttcggcaaacaaagatagagcttccccaacccacttacacttgtgtgtaggccctaggagaaatccccgcatttaagaatatgtgctctagatgataacttaagagcttataaatatatgggatgctgctttctcactccatgggccatatgttcacatatggatatatatgtgcttataaaaatactccacttacaaaaattaatatgttatcccatctgaactcttacaagctagatttctgctgggtgagtcttgaaatcatggattccaaatccgctcacttttcctgttggtgatttgtctattaattttggtaagtccttcagccttgtttaaacagaacaactcaaaagagcaagattctgttaagtctcttacatatcttacacccattttgtggaaacctaactgaggccctaaggattctttacacctggtacctgctaatgctattgtgctatggcaatccggtattttcattgccctcagatcttcctcccacaaggagacaaagggaggaagggaaggtctctgtgccctggagtttgactacttgggttcaatgcctgtctctgacctttcctcctcatgtaaccttgggcaggtcacttaactgctctgagcctcgatgtctgcatctgcaaatggatggtaattgtaacagggcctggtttggatgaaatgaggattaaatgaaataatatctgaatcaatggcctggcccatagtaaatgctcaataaaatgtgaacagtttgcagatataccagctttttagtaaatgggtggtacagatgcaaggcagaaattcaargaaatgaaatttactttaaaaagtctgacctgacagtgagctgacttctccataaaggctaggtgactgtactgagcctaaggagcaggtggcctggcttcaggcctgaaccraccagagacctcagcattgtgcagatctgccttgcrgcctttttagacatcgtgcagcttctttgttgggaagttgtatgtgacagtgctgttttttttcctcctaatttcctcacaggttttaatgtaaggattaataagacagtgtttgtagatgtctttgagcctcctggaagaaaggcactccaggaggtgataaattctctggcctggataatctactcatgaaatatggaactttgaaagtgtgagaaaaatctcaaatcactttgacagcattttaattatagttgatttgtttgccgctaatagtgaaaatgctgtcagcatgatttgagatgtttcttccactcaaaatgttatatttcatgtttttgagwcacaaggcaacattttggttttcagatacaaccagaatagctcagtaaatgtgttggggcacaaagacagagagtataaaatggatcaaactccacggaaagcatcatcgtagcacgcattcttctcaacatggaacaccagcctgaagtcccttattcatttacatttatttactcaacaaaaagtgaatgagacctcctacatgccaggcaccagggaagtgtcgtaaattcagcagtgaagaggcaaggtccttgccttcatggtgcttattgtctggtgcaggagacagatcataaacaaataggtatattgacaagacctttccagattataatcatagctatgaaagaagtaagatgatggtgagatagagaataagggcatgccatctgaaatagggtggtgacagcaggcttctctgtggaggtaamatttgtccttaagcctgaaggatgagcaacaaccagccctggaaagcaccaatgaggagtactgcaggcagaggaaagagcgcttgcaaaggccctggggttggaaagagctcaccatatacaaaatgtcttcaacatcttatgatcttatgatgagcagtgtgaaaggaggccttgcttggttggcaaaggttatgatgtcaggacttgggcagagatgttctgatacgtagacccaaaagaaggggcagagtattcttcctccgaagacctaagtactctatcttcgatacagaaatccccttccaagtggttctgtgtggcatccctaaagckggattctgacaagggccagacatttcggtgccctgagagaaggacctaagcttggtgaatcttccagcacaggctccgttgactaacccagcctttggtgccctgctgggaagtgtcaagcgtggagacagttatggaaactagaaagccctttttcatgtttgcctagtgatgagaggaagagatgagattgttgctttttcatatctctcccgtggactcttaaaattaacttcactgtcaaaatttcccatggcccaaatgtaggtttggggagagaaatgtaagactttgaagttgagaaasaaagtagagaaagcattctctagacaaatgctcaccatgcagacttcagaatctgtgaggagacaaataaaaaggcactcggggaaccgttttagagagaaaataaagaactgggagtagagatggctacttcagctcaggaaaaaaataaataaaacaatacaaggtagtgttaaagctttgaaaggaatttttcgtttaggagagattatggataatgaaatgcaaacactctagttaatatgtctgttagctggtttatgttgccttctggaaaacgagtgatacrttctaagaggagcagcttttcaagttatcctacttgactatcgttggggtgagctctgagtctgtaccccggattcctttaccaaacactggatattagacastagatgcaaagccgtatttattccaaagccagaaacttcctaagcctctgcctaactcttcacaaatgaacctgacaacactgaaatttctaaggagatttactccagctgtagcaaatccctcataataaaaaatttccccaaatgagtcagtcacacaggaggtaaatgagacattctgtatgaagtcagcrtgtcatttggagtgtgccctttatataaaaggcccagccagaagaccatgtggttaagtggggcttgtccacagggcagaaccagaagactggaagttggggggatttcagctgccsaactgtaactctgtgtcacttcccctcaagcaaaccttatagaaaaatcyagtttttctaagaagttcaagtaaggtttgttgattatttgcttcacaaaaggattcagcagaggggtcctttaactaacaagctcagagaaaaaatttatagtatgattgaattatatgaagctttttcaaaaatgcatcccttctctatatgtgtgttagatacataaggatgtatttgttgcaggcagcattacaagaagggatttggggtggtctgtatccgttgagtaaattgaggcaagcttgtaacagtggcatttgttgggcagccctgcttcattgctgattctgttaatcccctaaatgactccatgggtgattaggcaaccagataaaaccctctcacttctgatgaacaagccagtgggatggcagggcctctctttgtccttcctagagaaattggcaacacaaagactggaactatctggtgaagctttaaaaaaaaagtttaaaaaattatttattgaatgtgggtcatgtccttggcactgttccagatgtcccgacctactgtgtctcatttattcctcactccagttctgtgacatggatgatgatggtgatgatgatgaacttccttctacatctgctaaatcatgacagctggattcttttacaaagaagagagaaaaaattaccaattatcctaccacccatgtctgtcgccattgttcatattttagtagtctttcagacttcctctgtatgtttatgtgaggaaatgtatgtataccttttaaaacatacttttaaaaaatctcctttttaaaaagttaacagtatagcgtgaacatttttccataaaaacaaaaaattctagacctgcagactattgattgtagcaggagagtattccattttataaatatcccagatggattcaccctccctmtacggttgggctttgaaaccatttataagcaaaatatcctcccactttttatattttttcaaaatatatgcacaaagatgcatatgcatctttgcacaattgtctgattattttcttaggaaaaattcctagcagtaggattgctggattaaaggctatgtacatattaacttctgtcacatttcaccaaaatgcctttcagaatgtttgaacagatttccattcccgctgatactacacctctgctcatttgttccatttctgaaaacagggtcgcttctgctctgtggctcagcctccttgcctgtgaaatgggtgtgaaaatacaacaaatcacagttcacatttacttagcactcactgagtgccagactatggactaacactttagatagattagattttgtcatttaagtcccacatcaaccctaggagaagactgtaatatccctactttactctttttctccccatttctgaggctcagaaaggttcagtaacttgcctgaggtcacccagctaaaaagtggccaagctggggtgcaagcccagctctgtctgcttctgggattgggactcttgcgctctgggccatgcatttcttagtccagatgagttgtctgattaatgaacatgggtagcagagcctctcaacctttgtgcacattgccagggcatcaccattgctcacaggaatgtgtctgtccagcagtgcttgccttagtgtgaaaatagcacggaggggttttctggaaggtttgggagtttcccctgagaacaaatgaagcgtctttttacttttgttttggaaatgaggaagcatgttttcaaagtcagcaccatctcccacactgaaaycacagacctaaacagattccccaacctcacggycttctcaatctgtgaccatctctccatttctccctgggggttgaaactgccattttgacttctccagactctaaggagcttcagcggttctttttggactgtgggagtccagccctgtggggtctaagaatgaattaatcctggcccactccttagacttcctttacaggcctattatttgaaagtggctaagtaacatagctcctgggggctgaagtgaggcctcaggcctccccagctcacaccagccactccttccggcagccggcaaccccagatccttgtatgtgacaggatcctttggcaggcacatcccacagaagggtgcattcccagccctctccttacccgcaaggaagagatttcttaagtgttgctttaacaggttgatgcaaaataaataaacagaaagggagggagagggagatggatggttttcagtaaataatggtgcagcrgccagcagttggaagggagctggtgggaggaagtttcccacctaagcagttgtgacaggagtattaactgggagcccaaaagcagcacaaacgcagcacagtgaggactgccagagcacataccggggctggaaaatgtgtgtctgtcaagataaaatggtgcattatgtttgcaccttcccatgaacggagccaagggtatctttgaggtgcctgcttcccagccctggccagtttgactctgcttcaaatgagcacaggcctccacttcaggagggcagcctgccctgcctctcactgaggctaatagttgtgtgcacgtagacrgtgggcccctggagactcacccctgcttttggagaaaggtttttatcgccttatctaacatgaggctgattccttttaagaacacatgttgactagacactgctgatgggaacctcgcagagtcatcttagggaggcggtggcccacgggtggggagtctttgtcactaacaattaaagaagggatggcccaggggaaaattgaaacagggggctggagggagatgggaaaataaacaaatgtctctgaaacatcccccgtgtgcctggcacagtgcctagccccttacatatatattttttttymttctatcttctccccagccttgtggagtggatatttttatcctcatcttacagatgaagaaattgatgctcaaaggggttcagcagcttgcaatgtcacagagctaagaaggagagactaagattctgagagagcataatggaaataaaaatggtgctattgaaggaagaaaaaaatgtgttttgtgatatttgatagaacgatgctcctgctcttacgtgggcaagagataaggccttccagccatgtgtttatkcactctgtggctttcacaaagcacaacgacctgcagtatctctgtttgccagtctgtacaagcagacataagtgcccttcgcttatccatctgaaacaccttaacttctgcaaatgaatagagagacataagtgggagcgacacagtggtccttctcatgtccttsgagtgatcttttcttgtctgtgccatccccacccaggtatgactttatcgagattcgggatggggacagtgaatccgcagacctcctgggcaaacactgtgggaacatcgccccgcccaccatcatctcctcgggctccatgctctacatcargttcacctccgactaygcccggcagggggcaggcttctctctgcgctacgagatcttcaagacaggtcagtgtggtcacacgtaggggccgggagatgggcgtcttagagaagaaggagggacagcacccagtgggctgaggcactgggtaagggtgacagtgtcatccagcttgagcatggtgagaggttcaaggtgaacccacaaacatcatgagaagaagagccagctcagattatccaccagcttaagggggcgggctgtgggcgggggggtgggggtggggtcaaaacagccattgtttgtggtattagacaaacagaaaaacacttcttgaaagaattggatttttgtrtgttttttaaaatcaaaataatcttcatgggaaaaagcaaaactctgatgactttctcacgattacttcatggtctaatgatgtctttatttggaactacatggggctgaggacataatcttttcattgtttggagtctctaaagatcttgccatgacctcccaaatggggtcacaccatagcttttaaattaaaataaggttcctagaaattccccttggcagtccatgttaccacctctgtccattgaacccctactctctaaatgccaatgaacttgactccctgaaaagcaatcaaaaaatagcagaaaaagagtcagagggcactgcacttgctttaagttgactgcttgatttccatcaggtcccccttagattactttagggcctgagaatatgggccagtgctcatttccaaaactaaatacagcagacttttattcacaagaccccgcttcatcagctacactcaagctctcccagtggtgtgtcctcttctgtgatgtgtggagcttgttatctcgaggctaagggaagcatgtcctccagtcctccccacccaccacccactcccttcctcagaggctccccttccatctatgtgtgtgtctcccctctccccccagcagcccaagttttacaactcgtggatggagtctggttcgaggggaggttgtcagccttgtcatcaagaggcccaagaccggcgcctgttgagttcagtgtgaggggaactattcatatatattttctttttcactaaacagctcttgaaaggaagtggtagctgctgaaagcactttttatatccactctgtstaaatatttgtcggatttgtctgcccgagaacaagaacgtggaatcaaatgaaggggtggggcaaggggactgtgtcatgcaagagtggcagcccaggctgctgcagggcacaggtcccaagaaggtttctctgccttgrgttttcatgctcctgactatgatgaggtcrcaggggctgacaatctgtgtgtccagtggctcaagctgttgtgaggcccctgaatagcttgatccatattcccctgagtcttrtgcaaaattcagatcaatgccaccagcaccagtggagcatcctctgctgccgagcagtggggagaataaaagagaaagaaataaaaggggatgcttgctctcttcgggttggagaggcaggtgtgcaaaccctttgcacgtaacagattcgcaggtgatgttattggatgagtatgtatgtaaattgaaaggaaaactatgatatgaggcagaatgaataagtgcaaagtaaaggtacaattgacatgtggtggttatgaaaatgggggagcagtcaagtggcttagcaatcgaggggctccagagaatctattcaatagcaaggtccctagtgctaatgctgccactcggctgcactgtgctggccatgaaaggaaaacagctccaagcaagatcttccaggaagctggccaagggaagtcagaacaagggtgagcagggccatgaaaactcagccttggtctcacaccacccaacttagtatttcacaaggcatcatgctacattctccagaaagccacaggaaaagtcaatgttcactctatccatcatgcaaatttgaaaggaggatattaaaagataaaacatgtaagagggtatcataattcaatatcgctgtcttgaggacatgctgaagcaggatttcaaatgaagcaacaagtctgtgaactgcctagaaacaatggtgccagccaacggagctaggtggcttcagcttggagaaatggggtggcctgctttaaggattggggttgcctagtgaagagattgtaagagaaagccctgccaacaacagccacactcctggcaatgtaagagagcagatgagagcccatagacttctcagggccactcgtacctgccgtcatacccacctgctgctggaagagcaactgtccgcatgacagtcagtcttatatatgccgggcgcagtggctcacacctgtaatcccagcactttgrgaggttgtggcaggcggatcacctgaggtcaggagtttgacaccagcctggccaacatggcgaaacctggtctctactgaaaatacaaaacttagccgggcatggtggcacgtgcctgtaatcccagctacttgggaggctgaggcaggagaatcacttgaacccagaaggaggaggtggcagtgagccgagatcatgccattgcactccagcctggacgacaagagcgaaattccatctcaaaaaaaaaaaaaaagtcaaccttgtataaagtgcagaaatgtgcaagggagcaaaattcaaaacagagaagtttagaaaaatgagcattcatgcaggtgccttgtcctatacccacatttccattgttggagtcaggagagaaaatatacaaagtttacgtcatccacagaacatgaaagaaatgggtggacatgctgaagaaatccaaacaaacacagctatgtttgctagtcggattcatagagaggaagaagcgggggaaactgtaaacacagatacgcaratagccatacagagggctctagaagccttcgatggtacattaccctggtgaggctctgctgtaggacccacagtgtgagtgcagaccagggcatgtggctggcgtggaaggttcatgtctgccctaagtgaagtggtgtataaaagattctatatgttaccagactgtctacatttaaaagggtaagccagaacaacttacatacttaaaagatctcaaatcaagataccatgagcagaacagaaacaaaaaaaaaaaaaaggaatttttaaacgtaaaatgtcacattgaaaacaaaatcagtggaaaatgtgtgtgtgtgtgtgtttggttttttccagaagctcctttaaccataagttcaagattaggttttctttcctgtttgcctgtgacacttcagaaactgacatttttggggtcattcacagaggtagagaaaactyggagtgcctactgcctccacttcctgaattcaggaactgaattcaccttctgcggggaaggcaaactcagctttgggtaaatccactgtgttttaaatgtcttgatacctatagattcttctacttgcagagttattgtaaaattcacagcggaaaaacagagtggacatttttcatagcagagtcttttcctatgaaatcattcgctgcaacccaaatcccccagcttctgtagacaatcttagccttgagtgggcttgagtatttgttgacttgagttcttcgtttaacctttaaaccttctaacacatctcagaaaaggatcttggataaggcagatgtctgcaagagccagccagcttctgcctccttttctgagatctcttcctggcatctgctattcagctgcttttgtgatgctgcaaacagtgagatggtacgattagagatgaatgcatgatgttaacagacaggttttatttttctgcataaaaatagataaaactggacaaaagtttttccaccgccttcaaaataagccaaaggatatacccatttatagccatatatcagaaatgcttttttctttctttttttttttttttttttttgccttaagtacctaaggttgaagtttcttttcagtcaaatgcaggagctcaggaccctgggaactatggatactttcaaatttcacattctccaagcctctcttagactcactagatgtccatcgtggaagcacttgtgccctaccaatgacaggaaccaaagaaagattccgccagaaaattccccactcccaggggggtggacattccccttgccttctaagggaatgacaatagagcaagctctaagagggcatgtcaggatgctctttctagctctcaagcaagaagtgaatagagagttaatttcctcacaaccatgtgtgaggctcagctgagtggcccgcatgaagaatgctgcacagcagccataaactctaaccttttcaaaattcctcttggccccctgaagacccgccagctggcttggctttgctgaattgcctcatcccgggccattgaggaggccctcaggagtcygaagcccaatcataaacaaagctgggggaggcagccccagctcatccctccaggactagctgcccattgaaaactcggcctgacctgctgctgccatgcatatgaatgatggggtgcagagcctctgagattcgctgcttagagcctccacagaacccatgcaaaggttagcccttgccctcgtgtgttcctagtccctaccctgccaaagcacagcacaaggtggaaagtaggaagtgatggatggataggtaggagatactggaattttctgtctggtgctgaagaaagttgcaactcctccrtccgcatttatttgcatggcacttcttccaaatcagacatttgcctctttccagaatgctgtcatcaataaagagactcaatgagaggccccctacaggagctgcggataaaggcatcgctgcaggctcagatcagtgtattgacatcaccyagttatatttcagtgtgagccccagaggrcacttcctgacagtaaacacccagtttatcgagtatttctggttggttgtgttttttatgcttasagtgtctattatcctcctcaaaaatcctgcttccttttcttcttttaaaatctgaacataacgagtgaaatcaattctaattgtccagcactttcattcattgcgtgaatgtgcatgagctcgtgcttcgtgggtccatgggtctgggttgcagtgctcccgggacccatctgtggtgctgccctggcaaatggtggctggttaaagcacaaggacccttttaatatgactccacctagaggcattaagagatagggtggctgtaatcctcttatgagctcctgttcctgctcctgctgccatccaagctcgcaccaggatgcgaatgtgtgccgcatttaatcaggatgcctccatgcgtcccaagaaagcaracgcaagagctcaggagagaaacaaggccatccacaccacaaaggagccagaagmcttccaaatgtcaatgcactgctgcatttttccaaacttgttgccggagcggcctttaacatccccaacggcctgctgtgatccaccagctaaaaacatcgattgttaattgtccgaccactacagagcagctcgttttaatatagtcatgacatgaatgagacccaagctcccctttgcccctcccctgaggcaccttggatcttggagggagaagggggcacttcgttggctgtggtacaataggggctagtgttgaggtcagcaacaaataaggggtaacattgttttccctgctggcaatcagcaaggcttccttaaggattgaaataacttacatttctggagtgagcagctgagtaattgagaaagaagactctgttcctcttttcaagagaatccctctctctctctctctctctctctctacacacacacacacacacacacacacacacacacacacacttctctgtacctccaccccactccccaattcctcaattgctgctctcactctaataattatgtagagcaagccagctgtgcctccctaatttatgagggcttgaaacgtgcatgtgaagagtatgttgcttcaagggccactccagtagcaacaaaaacctcaagagcagggggatttggggccaaacatttaaataacccatgtgacagaggccacaaagaaaggcatcttcttcttagtgctacagttctcttttacatacaggctctgaagattgctcaaaaaacttcacaagccccaacsggaccatcgaatctcctgggtttcctgagaagtatccacacaacttggactgcacctttaccatcctggccaaacccaagatggagatcatcctgcagttcctgatctttgacctggagcatgaccctttgcaggtgggagagggggactgcaagtacgattggctggacatctgggatggcattccacatggtgagtgatgtcatgargcattcctcagtagcttggcctttgcctgttaattgctttagtgatgataaagaggaagaacaaagacttcaaagctcctatgagttcttatatgacccatggtgactttctcttcttccccttcactaaggatagcttgagagaaattacaggaaggctgtctactttcttggaaatatttctttagaaaaggataggagactaaatagatacttggaaargatgagaaaacttaaagtgttcatttctactccaaattgtcaggatagaaggtggctcagtggctaacccctgtgacaaaacagaaggactccagagccagactggccgggcttaactcccggctctgctactccccagctgtgcaaccttagacaaatcccttaccctatctgtgccttatctgtgttaagttagctgctatcatcatcattattactataattttaaaattgtyattaatatagtcataaatattgaaaaggtacatcacccaaggctaacagccaccagtacttcgcaggtraagaccaacatggatcttgggtctaattagtattggagaggaacaaatctttcacttttgtagtcattgtaagttttttctaatataaaggagacttgatgactaagcaaaaagagcaatttcatttcctgggtaaakcacaagacttagtcagaaaacttgggttgtaggcccagctctgctatttcctagcagtaagaataaagaaatcacatgcgctctccaaacttcagtttcttcctctgtagaacagacattgtaatgatacctttccagctcatcttccaggccactgagaacagaatgaagccagtgaaagtggcctgtacctttttaatgaaaaagtgaaagtgctttttgatgtgcaggaaaaatattagccattgttcttgaaacatatctttggtttttatggcaagatgtacaaagtgtgctccrctgaatgaaatgcaatgaggggaagggaaaacggagtgaaaaccaagtttgacattttgatttccactgacttctctttgtcttgaatgtccagttggccccctgattggcaagtactgtgggaccaaaacaccctctgaacttcgttcatcgacrgggatcctctccctgacctttcacacggacatggcggtggccaaggatggcttctctgcgcgttactacctggtccaccaagagccactagagagtgagttggccgattgggaacctctgtcctgtccttccgtcagggctgtgagggtrtacaggtgaaggggggctgagctcttatgagggaggagatgggaactctacggaatttatggtggcatctgagtttagaggtgcccacatcctcttgccaggaagaggttgatgagaaaagaacacatttcaatctgggtgcttctttctttaaaaaatatatatatgtgtgtaacaagaattagttattttcagggaaagtcatggtaccatctcatacctcagtttcctcatctatgaatgaaagagaggctagttaggatgatctatacagggcccctcctgtgctaacatttttttagtctgtggccatttttttccctctcaaaatctcaggggcaattgtcacaaaagtgaaccattttaaacctctctttctctggattttttgacattaaccrtctctgggcctgggtaatgttttcctgactagattggtacaactgcttagacttggacttcacccttccaccaaagatagtttgtggagcttctagtatgtgccaggcaccaagcaaggaattaaaaactatcactctgatcacagctgctgtgggacctgcagtccctcagcactgagcaacatcttcaaatcagctgctcttggacatgtgtttcaaatatgctgccatttctacttaaaaacccaaacgataacttttttttttttttttttttttttttgagacagagtctctctctgttgcccaggctggagtgcagtggctcaatctcactcttcccagtgcaacctccacctcccgggtttaagcaattctcgtgtctcagcctcccgagtagctggaactacaggcatgcgccaccatgcccagctaatttttgtatttttagcagaggtggggtttcaccatgttggctagactggtctcgaactcctgscctcaagtgatctgcctgccttggcctccccaaatgctgggattataggtgtgagccaccatgtccagccccacataactttaaagactgaagaagcacttttaagaaagattcaagctgtggaaatcctaccctgattgcagacaactcaccatatatataactacagacacggcagcctggcctgcaggaaggttgctgggttttgcatttgttttttcatcaaagagcttctgaagattgagtgacaaagaaacagtatggcaaattgcaccaggtcccgtgaatggtcagtgcagtcacagagtaaagaataggttgatacctgataaggattgctggccgatcttagacacatgcacacacacatatcgatcagtgttgatggcattcatagaaggacagcaatgcaactgacagcacagggccagagtaagtgacttctgggtctatttgtccagacaggtggtgcgggggaatagagagtgacatgcatgtgctcatggagagatttcccaaagacaagtatttatgctttgtaatgtctgtcttctgtgccagaactcacaagacagttgagtgaaaaaagaaagaagcaaaagtgcctcctgggtgtttattaataaagcaggcttcccacgatgtatgagctcacccaaatcgccacgagtctatctcacatttacctgtattgcagtaatggtgcatctggcatctgtagcctgcagcaataacagttcttgtgctttagattgtatttttaatctgtatgatgattctcttatttatccatagcctgatttcttttaggtcccatttagtttctctcagacccagaggggttgtcaagctccatgacttgatgtagttgtttttaaaatgtgagcatataattagggtcttttaaatgaggaagtgcctgcaaggacttgtccctagaagggaggcagcatttgggggatcccgaggtatgaggttggaaggcctaactgcatttgaccgtctgctttccccagactttcagtgcaatgttcctctgggcatggagtctggccggattgctaaygaacagatcagtgcctcatctacctactctgatgggaggtggacccctcaacaaagccggctccatggtgatgacaatggctggacccccaacttggattccaacaaggagtatctccaggtacttgtgcagataccagaggatgtgagagtgtgtatgtattgctggggtaggagggtagctcctcaaatayagtaggcagaggacacaaagaaaataaacacagcatacctgagaactccattcattcattcatccaaacagatgtgtatgccaggcactgggttacatgctggcatacactgatcagagggagcctgcccctgcccttgtggggattactgggcctggggagaagttgtttggccaggatgctgtttgccctatcactatagatatccaaggaacattatataagctgtttggatcttcctcattcttggcacagggaggcatcagggacatggggggcattctcctaaggggaggtttgttgaggtgctagctgcacatgacagcttctcatgatctttgctattggagagagccctgccaggaaggttttgcacagagctatcagaagaacacataggaaaatgtcactaccaggaacagaactcaaggtgccccagatgctcggcagcatctcttcagaccattgtttgctttattctgaataaaccttgcagctcatgttgagtaatcttcccgcactgcacactgctccaattctcatcccctgggaagaagtaaacagggggaaagcaagctactagttccacaccagagcagtgactgcttttatgacacacgtaagacagccttgtgacccactgacaagcctgtcctagctctgaggcgacacagtgacctctgctctaagaaggatattgcaaagcagacaacaggaaagggagaaasaccacttagaaactccagggagtccacagaggttctaacagtaagccctggggccatttgtcattgtctcttctctctgcctctccaaaaatccatctcctcgcagcctgcaaaacttccagaaagttctgtataactggcatcccctatctttgaccttaatcatatactttcgcctattgctatccacctgtttctcatacgtgtagacagcactatgtactacttattcaaatgtttagtaatgctgagcacattgtaggtcaccaataagtgcttactgaattgaatttagccagtgtgtgctagctacattttggtcatatggagactgccattaagaaacaccatggccatcaaaggaatgacatccagcaatttccaaatgggtttggcattgtgggaggggaagtaccttaaaatgttggccatcctcctcatagagcaaaaggtcaggactcggtgcataagcctaattgcttgggcagactctacatgccctttgaccccttagtgacctgagcaactaaatacacaatggagcgagagggtgtggggaggggatgcctctatgagtgtgacttttggaactagggcattataagtgagttggattgaactggacaggagtagagtggagtagattcaaccttgtttctttaaagcagcatctgcttccacagtccaaggcaggccatcatttactaagaagggattatagctctagatgttcaatgattgagaaaaatcgagtattgtcccttcatatttgcaaaagagagaaaaaagaaaaataacctaacttttcaaggtgtctgatttagtgtaagataatgtgagtttaatcgtccaatggaattgcaaactgatactaattacaagtatgtctcagtgaatcacagatacaggttggaagcraagtctaaygattgtgtcctttggaaaaaaacaagacactgccctgtrttgggaatggtggtctcttactccagccctctattccccaggtggacctgcgctttttaaccatgctcacggccatcgcaacacagggagcgatttccagggaaacacagaatggctactaygtcaaatcctacaagctggaagtcagcactaatggagaggactggatggtgtaccggcatggcaaaaaccacaaggtaaatccatgatcctaccttaaaggcacattggaccagggcaggagggatgggatcaggggagctttaagccgacctcctacaggagagagggccttgtgtagtcaggctcagataattgatggaggcaagggtcgtgctggccttgaaaatcttctctcttaggctaaagcgattggaaaacaccgtttctctgacagccagttgctgttgcatcttgcgcagcagagagagagagcttgcagagtgttctctgacttcaaatgaaggagaaaatatgtccccagtccacttctccccacccaggattcactgaacatttatggcctgagtcccttccacatgctgggttaacaatcacaaaaccacatgatactatagttcaggagttaccgagctctggaaatgaaagggcacaaatcctgagagggaatcacaatgtcctggagaagaaaaaggacaataaataaygaggagaaattcagtttgttggggatgggctctgaactggcaatcatgcttagcggcgaggcattgaattctctctgctggtgcctcccgcatctgcggctcccggaggtgtggtctgtgtgggtgatgtggggcttttgttgtatacatatggatgaatgtctggcactccactttcttaagacatgacattctgggtctgcagctggcacaggcgatgtgctggctctatgtgtatatacacagcacactcagcccatgggggcttattgcaaacagccaggggcttgtgtgggtaggattggggtatctgtgatgggaacacagggcacgatgccccctgcagagcaggagctggtgcagaggtctggaaggagagtgtgatgtcygggggattcctaggggctgcctgtccttccctaaaaaggaggtagggagggaggaagagggtctctcctgtagcattacagttccaccargccctggtctgtcagagtgtgaattatcaaaatggggcacatgtggccaagcctagggaggccaaagatcttttccaaagggaatctcctcagcccctgtcactgccccgaggcagcttgctctgactggtgcagctggaaacctcagacccagaaaattctgaactgtgatgttggcagtctcacttgggaaaygggaaaaggagtagatttttaaaaaatcaaaatcaccatagtaacggggtaccactcatctgaaaaccatggcttctggatattaccaggtatctcacacacatgcacacaattgcccgatttccacgataaggaaagtgaggtacktagcaattgaaagatgtgccaggccaggtctggtttcccactgacttggtttcagaaagacttaccaagcatccgttgkgaatgcccagcctgaattggcactgggtgccaggagcttgggggctgagacctggttccaccccacccttttcaattataaaccggtagatctcggaagctyagctagcagacgagggccagaagccaggcaggggtggtccccggggagaggagyggggctcacctgattgtctccctgtccaggcgcaatgactaagcagcacaggcccagagggatactgtagcataagctgttttaaaagcatgcagatggaccaggatgctatttaaaacatcatttgtaggaaatctgcttttggaaataccttagcactgcacattttcatagaatgctgtcctccctggctttatccctggtattcattcttcaggaaagatattcctgaaattgaatttagctttctggttttcagaattatttttctcaactttttcataatggatatattctctctcttttgcctcctctttccccacttggctagatttagttccccagcagccaaggggtaacttgagagtttttttgtttttgtttttgtttttgttttactgaattagtcgtgcccaaataaatggagttggggcagaggaaaagcccattctcttccccattagaaattcatcctttgtgtacttagaaggaggcaggaaaatggagagcctgccaattaggcatcgccccactctccaagctccttcaccccactgcgggtgtggtggacgcccaggggctttccttgtctcccctgcaaggatggtctcagctgccccttcattagcagatctttcgttcagatatctgtatttaatgtgcagattccccctcattcacggtgcgtcagcgcagctctctgggctgttggggttgaagtagttgagtgaaccgtgccaaatagatttgtcaagtctgccgcagtttgatttgatgccatggggggaggtgggggttggggagggacttgggggcastggaggaagaggcttcgtccatgccgagtgccaccactgagtttctctttgtagctgctggatggtgggcactgtgccaagctaactggtgctaagtggtgggcttgaaagtgaaattcagacaacaggagttagcagaaaagcaaagcagagatgaaggcaaccgcctgctctgctctgctctgctcagagcagagggaaggtttgcaaatgccttcccggygtgcagggaaggaagagggaatagtgacatttgggacagaaatgtgggaactcgatttcaactccctggtcactgtcaacagcaatgcagcataccaaagaccagggaattggggaagtcagagaaaaacaagtttaatgagtgctcaaggtggcgggggagggctgtcctatgtctttgcaaaacactgtttacaatgtggacccagacggggctgaggcaaggcctaggcctctgaaagaatgccttcctttttactgccagtgggtgagaaagactaaggaactcttttccagcctcccctagccaggcagcagcctgttcttggtctcttcccatccaacaggtcatcatgaggtcgcctatgagaaagtggtcagtcacactgttgctggggcattgcaagcctcctcctggcaaacgcagcctggttacacaggccacatgcacagcacatcccaaatctttatcyaattccacatgccataaatatggaacctatgattctcatacagggtgggcccgccttatgtatatttatggcataaccacaaggcagagagctcatctgcctgatggaatccatatccaacccacrtgctcctttagattatacaaattgctttgcatacatttcttcagaaaccacaagcagaaattactgcttttggtttccccagctatattaataacaccctagatgcagacatggcattgttaatacaacagtagaaggttcatgtatgtttacataattataggcacaattatgtacatacayaccaagaagggcgcrtggagagcaatgggaagagctcagaggcacaaggtcttggtctagttcctgccctcctgagatgctgattccatgattctgcactggggataggctgtgcctcgggaatggaaccacagctggtgacaggacacgggggagagagactactgcccttatttgtctaggcaaaagcccttatcttcagttccctctcattcggtaaacgtggggatctcccttgttgacacagctctagttagtcacagtgtttctgggctattctgatgcatttggaagaaatttgggctaaaagagaaagtctgtggggtgccaaatgcacgctattggccagatcgaggatggatgggtgaagatagggatgaggtaagacttgggtccaagaattttcagaattaccccaccaggagtggaaggaatgcactgagttcatcacattaatgtaaggatgacctccaagggactcagaaaatcctcaggcaccagcttattcactagagtatttcacagagtttcacaactgtggaaytgaagctcttagagattaagtgccttgctgcagggactaggaaactggagcctgcatggacggcgcctggtcaccagacttggatgtccagactggcgctctccacaatccgccctaggccttactcttcatcttgagggaaaktggcttcctacatgttcagtccaaggactgagaggtacacattttcctggaaagcctcctcttcagtgaagttctgcatgcaggatgagcctgtacatggcttaacccactaggctcattattgtggagctgggcttcaccacagaatcatgaggatggagagttgaaaggagttgccatttgtttgatttggccacatcccttcaaaacaaataaacactccacttcaaaaatcctctatcccatatttattttctaaattaaaacaaatcatttttaaatcagagacttgggaggagagaaagagtggtgtcagaaaaccaaaccctcaaatcagttggctaacagctagaggcacgtgatgtctattttcagatcttcttaaacagggcaccgtgtgatcttggaaacatctcttagtggctgcacgcctcagcgtttccacccagtccaaatggaatggcgctgcggctgctatcggcaaagcaccttgagatctgtagatggaaggctctccgcggatataattaatggagtagacccacaaagctcttcttgagcagaagcaagttatcaatttaaaaagtaagaaggccccatgggatatttatgggcctcttttaaaatcataggcctggaatggaccatgataagtcatccagacctttccctgcatctgatggggcctgcattgagctgcctcagataaatgtcatccatcccagcctcactgttctcttagggatgcaattatgcttctacttgatcatttaagttttcaggaaaaaccttttttttaaaaaaacctcctggcagatgatgggcttccccttattccttttgtggtagtaattttgtttgttgaatatgagatgaggacaatacctcacactgtaatgggcaccagccttcagaagtcatgttgygtgtgctctgaagggggctgataccccttccaagttcaagtccctcagtttatctgaccctctcaattataatggagaaggatccagtgccctaggtaattaagtttgtcccttatccatttgccatgggatgagstcagacctttagcctctccacttaggaagctcaggggaaaatttcattatacagaagcttgaaccttttctctatcaggctcccgcggccagcgtcacccagctcccgtgggtgctgaactgtctccagtagctgaggcgcgcctccctggcgctgatagccttgatgttaaactccaaggccccggctgtgcacagargccagtgacaaggagcacacagaggggatgtggaagggcgctgtgattctgcttgggctgtggaatcatgttccttgccccaaccccaactaatgtagatgagcactggagtgaagccctcacctggtagattgtcctgctctctgatgtcaccttgtccctgctccggtttgcagagcctccacctgaagaggcaggcaggtggcagaggtctctggaacctcactccctgttccctcaatctctccccacctgggagttaaaggcacctccttaagaaaacccaaacatctgtgttaggaggtttccaggggtggagggcccaccccacccagctagaatgtcctagaatgtccgagtttctccttccctcytcctaggacattgactgttccccccaagcccgctcattgctctgatcctgtgctcctcccccgcctgctcttctccagccccacccctgagctgccctcctccccgctcctccctgatgcgttcctgtctcaaatcctgaaaccctaatcctgttagtatgctgtgttccaggcctcagcgtctcgatgggggtaacataatcccgcagtaaatctagcgggccccgcargcccacacagatggggatgcgcacatccccgccccccagaacgcagccgcccctgtgcctctgtctcctccttcatgtaggaaagctgcctgatgacaaaaacagcccgaaagtaaaggaggatgagagcagaggtcatcagagtcctaaatgtgcatttggttgttagacagcttctttgcctaccggcatccctaccttctcttaatctctctctgtgtttatatatatatatatatacatatatctatgtaaagtatacacgtgcacacacacacacacacatgcctctaactctatatctggctaagttcccacatccactagaatgaaacaagctttaaaacaagtttttaaattgtctttaaaggggagttttaaaggagaaagatcaggaccatgattcacaaacaacaaaaaaagcccattgccttcatatcatttcccaccgcccccccccaccccgcatcgcaacagttccctccccctacttgactgttttgtgcaacaaattaattaaacaggatgscattcattgattagcaatttatttttacgtgtagacccaatggctggtttcagagcagatgcaagggaagggggtgggagagggaggacacacagatctgcagtcagggtgagcggatgagtcagcacatttgttcctgacactagttttaaaaacatgcttctggcttcccccagcctctgtcctgcattcctgccacttttctcttctgcctgctttgttttccyccttcttgagtgtctgtgccaagtacattgaaagggagaactttggaggcaatgaaacatttattagtggagagaaatatttattttaaaaaagaagaggaacatctcgtgcacaatgtctaccccagggctccagcactgcgctgtcttggaaatatttccctgctttctttgcagtccctggagctggctgacttcagatatttacagcaaaatagaagtaaacagtagttcacaccataggtaatgaagagatgggagtgtgcaagctgagtgctgaagcgctactcacatgagaggtggtgcacgtgaagagagactgtttttgtaccccaaagrgcccgcctcatttgggaagggtgaaacagccagccgtgtctctcctccaaggagctcaaagacttggacagaatcttcatcttaggccccagaggcaggcatgatgacaggtagcatctacactgtcctgggcacatgggtattgatagcaaagatgaatggtatataagaaaaggctttaggctgggcagaaaaattcctctgcctagaggcctagaaggtaggaaggctgcaaagctcactgtcctcagctatgtcagtcactgcatattcttcaaagacaacttaaggaggggtcagcaaagaagaggtgactgtgacyagaaatggggtgggaagcagagaaaatgttctgagatggcctcagaaaccatcagtaatgcgttctggctggatgcttcttattagattttatatatatatataattatatatataatgtatattatagaatatattctatataatatatagaatgaatatattctataatatatattacattgaattatattgtccatgccttgtggactcacaggaatggtcaaaatgcactgattttctttgcctgggagtgtagataacaaccaaactgggatgctggatagcagctgatttaattggcaggtcccccactcccctagaggtgcaaatcagaaaatccaggaaatgctgatggttttcaggttctgggctactgaaaacaaatcagaggtctcaagaatcaattgaaaaatgctggattatattcagaattcagagaggcacccaatrgattatccagaccactttgtgccctgaatcgctttttaaacttggtttgcagagatgcacttgaagaaatctttatgttcaacttagctctttttaaatacgcacacacatatatttttaataattacaacataatcaacactagcatcagaaagctagggtcaccttgaacatacttgtgattttcctttgggtagtaaacaaccatactaagatctttcttttaaaacaaataaaaagtgggccaggcatggtggctcacacctgtaatcccagcactttgagaggtcaaggcaggtgtatcacttgaggtcaggagttcaagaccagcctggccaacgtggtgaaaccctgtctctactaaaaatataaaaattagccrggcttggtggcgcatacctgtaatcccagctactagggaggctgaggcaggagaattgcttgaaaccgggaggcagaggttgcagtgagccaagattgtgccactgcactccagcctgggtgacagagcaaaaccccatctcaaaaataaataaattaaattaaataaataaaaaatatatgtcctctgtgacatccagcttctaaagcagatgttaacattcctatctgagtataacatacaaggcaacccaccgatttttctcagatacctcaytgcaaagttgtcatctgaaaattgttggcctgaaggtgggacttgggagtagtcgtggcttttggaacttaaactctcccacctgtgcaaagacccacttgttacttgtgacctggcttacacgctaacatttgtcctgggtgctatgcaagccttggagggagggccagtaaacttaagtgtctatctgcaagcctattatcgactttattttcctgaaggagaaaccaaggtatctaaggtttattgatttgcctataatgattcagtgagttgtcagggaatagggaataaaaccaatttcctggcgtcatttcccatgcacacaaccccttaccttgcaatgcctagactggaagccaagaatccatctcagtgaatttgatcagaaaacatatgaagggtgattctaaaaccacagaagcattgagaaagtcataaagatgtataatatatgatagcatttactagctataaataggggagatgcagggagaaaaatagagaccttgtaaamccattgggtcaggataaatagaaactgcttaatatttcattaaaaatggattttcataaattgcactttgatatctttgggcaaaagacaatatgtaaggactaaggcgttgttattcattactctttgttattaataatttgaactggtattgaaccaacacatcaacaaggtatagtcgccctgtgaatggggcactccccatgtgttctgggcactattcaaagtgtataaaaagtccacagccaccgtctgcaaaagcacttaggctgtaagggacaacgggtaactaaagtgccctgttgcaaaatggacactgttagagcagttcaaaccacaaaaagtcatgcgaagaaaggtttagaagcaggggaccagagagaaccctacaaatcaactcatacaatcccctcatttaacagaggaggaaattggggcccgagggaggtagagatatttgcccacacttatgagctaattagccgcagagcacagctcctggcttctgattcagtagtgttttgtrtgtgtgtgttgtttttcccactataccacactcagagtgagaggtgtgttaaaaaatctaataagatggtgttccttcaccatccaaagaacagaaggcagatgtgaacacaaagtcaagagcagacaagaaaacagttcaggaactaggcttggaaacgtgaagggtaatttgaagctaagttgaaaagatccttcatttgattcaagggtgggagaagagtgggcaaaatgaaagggcagactgaagttcaattgaagcagtcaggtagatrgcctaggggacamaaactgtgtgcttgcctcccttcctgagtggtgctactgtaagcagagattagggggttcacccagagcctgtggccacatgtatccatgggaagactgaccccctccctcagctcatacatgcgagtgcgtgcagcccatgcccatgtgagccacactcatgcacacaccgccatcccamagacagtccaaatacacaatcatttactcattgaggaaagaaaaggtctcttagygttgcctgccaaggctgagaaatgcaggggtcggataagataaaattggatattaacaacacataagacatgctgtgtttctaaacggtaccagcgtggtgtgtatgctgtggattagcggcagtgttaaagttcagatccactcaactttccaattatgcattcacgtgacaagtaaagcttttttcacccaatgtgaactccttagcgtctcctgatggcgaccacacacacagtccccatcaccatcttcagagagcaagccagtggaggcccccctgctgctgctcacaacacccatccgaaataagcaaagtgctgcatttgcttcttcctttccaaaacaaaacaaagcaaagcaaaacaaaacaaaacagaaagcctctgcctcatgctgaattctcagagaactgatgaatctcttttctttggatccagttccccatccctttcctgagagctgtggagccctttwtcagtacgaaggaagtagggtcagtcaccactccccttgggccttctccagggtgtctggccctaaccytctttccttccctttgcttggcttttctccttccctcgctaacttggtcttctcactccttctcatccacaatcgctatacaggaagcagcaaaatcaaacctgggagagaggcatgactaacaagttctttcccggtgctccctgctgtcaaccttaggacccgggtgggaggacttcccaggggaggagagggagcagcaggctgggtgckcagggggcacccccagatttggtggacttcgcaccagatcaatggtttaaactgaatatggtggaccagcgaaaatctgcttccctgtttgtcttcagccagccacttcccttcatttacttgcaaaaggtatggtgtcttcagtggtgtgttattaaatggctctaacttttaaccttagcaagcaggaaatagggctgttaaatgatggagttcacagttcatggggaagaaaggactgtgttgtcaattggctgtagacttctgtgctgctctttgccattactcaaagccattctaaggtgggattataaactcacactggaaacacatcactggacagtgactctacctccattcagcccatgcctggagactttaagggccccatgactcccagccaccagcataaacactgcaaatgtgttagaagaaactacaagcttaaaacctaaaaacttggcaaggatgttggatccagacaggcatctctgagcctcagtttccttatccaatgaagtggagataagaatatctaccttctggggtactatagatataattgtttatactcaaagatattttgttgcatctggctgaaaagtcttcaaatataccagtttccccagttctcttgtcccasccctgttggtgcccccaaacacttggcatggtctgaatatcaggagccgaaacatctagttctcctaagcaggagaagtcgctgatggttgcagagttggctgtaagtagatttacagagtcccttggttgttacagctatgacagaaatgatttagaagtgatgsttggttagttggtttttccctctacccttattcaggaaaaccaagggaaactcacatatactttgctctagttacttttttttttttttttttttgarcagagagcacaaaaaagcataaggtccatatggcagttattgatctgggccatctggaaagccaggacttgctcccaccatgtaggatcagaagctgttccaaaaagccttccctcccataagagatgtattggtcagatggggacagggatggatttcattacagggcrggactacagtgagaggaagctggagcaggactctgaaggactgtctgcaaccctgaccctgccacaaagatcagagagaaccaagaaagtgttgattgacacagggccattgtaggtagagggtgcccctcatcatcttgtccgctcatgggtgggatggcatcaagtaactaacaaaaacaaccgtgaagcactttgcaattagaaaatgctctgcaaatattcctaggtgcctgcaacatgaggaagagggagtgtcaagttcaagctagtgagtgaggtctggtagccctaaaagatgatatttttacttcattttaaacagatattctacttttctctttcttccttagcttctcaagtgttttccttcttctgcctgctctcagcctggaggcaaaattttccttccctctaaaagtttctgggaagaccactgataattttcaagtagaacagtgtgagaaattaattttttttacagtgtttctttaaaaagcccaaaacaacatacccactgattatttttaagcttgagggaaagaaaatttgacagaactttcccatccccttcaaagackgctcaagtggctgaactacaaacaggggtttcaataacatggytttgcatcttacgctacaggtatttcaagccaacaacgatgcaactgaggtggttctgaacaagctccacgctccactgctgacaaggtttgttagaatccgccctcagacctggcactcaggtatcgccctccggctggagctcttcggctgccgggtcacaggtgaggtgggggctccaatgaggttggggtgctgattgagccctaggctctgctccctttcaactctctgcaaacagcatgactgcaccacatgaccttcccagaaagactggctcaaggactcaagtcctaccagagtttgtcttttcattcattcattcagtatacatttattaagcatctacgatttctattaatagctaacatttatggaatgctaactaggtacagatgccattctaagcacctaagatgtaacatattttattatcctcataaggactccatgggtattattctcctcactttacagatgaggaaaccaagacttaaagagctaggtcactcaccagtaagtggtagagccatgrtttgaatctaggcagttccagtccaaagcccttgctttcaaataacactctctgctgcctcaacygggggccaagagctgtgcatggtgctgtggacacaaaggtggrcacaacagactgttctgtgtgggcayatggacaagttgggcagacatactgataaactcataaataaatataaaatcaaaactatgatcaatgtctggacatagaggcttatggtccttggaagtacatcgtaggggatttgacccagcctaggagctcaaggaagacttctttraggaggtgatgattgaggtgaggttagaaggcaaataacagacattacctggtgaagaagggagggaaggtgcaccaggcaatggtcacagctttctcaatggcacggtggcaagagggaccaaaagaggaagtgaggagcatggacacagcttgtgggctgaaacccaaggcatgtagattggagaagaccagagtgggagttgggacattataggaggcaatgcagggggtgcagatgggagatgatgatggctggattagccccagaaatttatggacagaccaatcccctttatcttgtgggctcagcccagggcaggcaagttgcctctttgacctggaagtgtcttcagtgtacatccatccacgtgcctttcccctaatcattccagctctgacagggagtgctccaaggtctgaccctgtttgaggtttctagttaaaacaccttgtgtttgtacagtctctgcatctccacatgcctttcttgtttatcatcttgcctacactttctaacaaccctgtgaggtaaggtgggccagggactgataaggaaaccaagactcaaagaggctaaatagcttgcccaaagtcattcaactaggaggtgacagagccaggatctgaacccacgttttctcaattcaaattctctgctcttaccacatttacacaaagacccattttcttctaatgggatcagtttatgctaatcctgtctaggggactattttctgtcccttccctgttgctgttccaggataatcagcaaagatttaggtagaggtcattctctggaagattgaaaggagagaaccagtgattttgaagaaggggaacaacstggaggatctyttttatccatagctcagttwgcaagtatgaaatgcacattgactatagaccctgccttgcctgacatcatttattcatgcattctccactcaatcatttgttccacacatctgatgtgccaggcacacactgggaatgggacatagagacaggaacaaaatagatggggtctctgacatcgtagaactttcaggctactgagcaagatagataataaacaaatgcaagtactggataaactagaatgtgcacatgaaggaaaagaacagggtgctctgagggaaaccaatttagtgaggattgaaaatttgggaacagcttttctgtggatwtgacacttgagcttgggggtaagaaaatgttagtctgggggtgactgaagggaaaagcatttggggtaatgggaacagcatgtgggaaggatccaagrcagtaaagagcagttatttgggaagtaaagacctgatactgatgccaggaaggtttccttctacttggcaaaacaattactaggaaataattcaatgtttagctcagttcccctgttctcagtgtccctgatagggtcagtggggactagtgtcatcgacagggatgtgcagacacacattctgagagtccttggttagagctgtaagcacaaatagttaatggccattggatacttaaatatgccaggcaccatcctgtgagctcttagtaactaacagaatccttgcaacagccctcaagaggtaggcacctctattagctcccctttagatctaaggaaactgaggcaaagagcaattaaataatttgcccaaggccctctgactagtaagtggcagagtgaacatgaacacaggcagtctagctctgagtccaggctcttaaccacagtgctgtacacattcaccatgcaaagaaattagtgctgacttagtatttgacagttgggctcttttgcagctcccttcttatagcgggtggtccctggttagcaggtgtcagccatgacctcttgtatcttcctctcctctctgcagatgctccctgctccaacatgctggggatgctctcaggcctcattgcagactcccagatctccgcctcttccacccaggaatacctctggagccccagtgcagcccgcctggtyagcagccgctcgggctggttccctcgaatccctcaggcccagcccggtgaggagtggcttcaggtagatctgggaacacccaagacagtgaaaggtgtcatcatccagggagcccgcggaggagacagtatcactgctgtggaagccagagcatttgtgcgcaagttcaaagtctcctacagcctaaacggcaaggactgggaatacattcaggaccccaggacccagcagccaaaggtaggctgttcttggaggcctctgtaacgttaccctcaacagggaggctaagtgtggtacagggagttgagactgatgatgtcccatctaaacagtcgtcatccaactcctgaaatccaataaaacaaatatcgtttgagagattactttgtgccaggcactgtgctaaataccttatttctgactcttttktttgtttgtttgtttgtttttgagatggagtctctgtcacccaggctggagtgcagtggcctgttctcggctcactgcaacctccgcctccagggttcaagcgattctccagcctcagcctcctgagtggctgggattacaggtgcccgccaccacacctagctaatttttgtatttctggtagagatggggtttcaccgtattggtcaggctggtctcgaactcctgacctcaagtgatccacttgccttggcctctcaaagtgctgggattataggcatgaaccaccgcgcccggcctggactcttttttaatcgttacaacatctgtgcaaagtagatctttttgtcactcccatttyagagatgataaactgacacttgatatcatgcccagggtcacacagttcacctgtgatagagccgattcagaaaccggaagtctgactccaaagtccagatgcctaacccctactgaacactgcctttttataaagttcaacactctttatacactctttcagataaagtttccttgaaattggccagacatctaaaggggatgtggtttttggaggccaagctatagaaactagaggatgacttccaaaaataacgatgtttttctgaatgtcgctgcattcctttgtattctcctagttttgactgcttagatctttccggcctctcagactgagkcaagggagaagcaagagaaactcaccccgagccagaagctcaggccagtacagcttactcccctgccaccagagtgaaggtcagccttcaacacagayacaaggagccccagaaggggaggagaygtcatacctctgtccctccccagatcagtctcctggcaggccaggctctctgattcttatctctagttaccccttgtttttctcaaaagaacaggtccctaaaaaaggagggagtttgcatgtctcggggccacctttgctaagcaaatgtctccattctgaatacagaggcaagagttgggttggaggttttgcgatgctgaggtaaactcccagctctcaactccagaggcttagaaaggctcagggcttggtaactggaaccttgcatcgatggagcagaagttggaccgcaggcttccccatggagagctgagcctggtttttcttgggaaagaagttgatctttgccattgtgggagacagccctatccgagacagtgcttctggttcagaattgtggacgcagggcatcctgaaaactggagcggtcctgctgaatttctgggggctaatcagctgcaggccctggccacccactcctgtccttcccccggatgagtgtctccaagtgtactctaggctggtcctccaaagcagccccctgctccccgcatcatcagttttatgtactggggctccrtgtgaggtttcttttgacaggagtgctttccctaaacaaaggtttgggaaacagtctaagactatcgatgtgtgaccagaagacagtgtcattggcctaggggtcattttcccrtaaggttctcagtgagctaggaactatcagtcagcttgggttacctcaatggaggctttcacrcattagaaaaagaagtgtycctttccctgtagaccaggaattcagaacggtcaaagatcgcccaaactgccttccccsctctctagccaaagtcagctgaaaacgcagttggagccaaattcttccccagatactccattttagtcaccaggtaaaagacacaacctggaaattgccacctttgtttacttcctattttccataattctgggtccataaccaccttccaaatgaataaaatccttggtctgaaaatgaagctcgcgtggatcagaatgtcccagtgaccaggaatcaactaggaagctgccttcctagcaggacgtgcggggcagggaggagaaggggaaggaaagggaagaaggtgatagggactgggtcccacaccagaagggctgagtggcctctctccctgcagctgttcgaagggaacatgcactatgacacccckgacatccgaaggtttgaccccattccggcacagtatgtgcgggtatacccggagaggtggtcgccggcggggattgggatgcggctggaggtgctgggctgtgactggacaggtaagatgacatttcctcctctttgcatctcacccacatggtcctctgaccctggcatcccaygaggccctgggagggctgtggagggggcagccatcccaggagctggaaatgctgcagacccctgccatgttctcctgcctcagaccacgggtactgcagcctctggacttgggacagtttctcaagggatgtactttgtcttttttaagggatcatttcagttctccaacccgagtctctcaaaaacaaatcataaccacacaccacccacccaaattcaattagaccctggctcttcaggccagagggctgtggctgttgatttagggaagaaaaaaacccctcatgataataaagtaatcggtttatgtctgaatctggcctccagatgtcagtggctaagagacttcattttcatttcggagccacatctgtaaaaggcatttatttgctcaggagggaccctgttgcagggagctgatgggggcaggactccttctcattgtcctgctcattcctgccaggtggcccaggccttggggaacacctctcatcattccaaatgagggtgaggcccacggagggtgcccagccttcctggtttccgagggagggccctgcccttctgagtcaggccctaccttcctttccttgggtcgccagccctcctccctcagcagagctggcaccagatcttacccagagctcactcactgcctgccaaaaggagttygtgggagccactggggctcagggactgagcctgatgccagcaggagcagccaccagcctgagctatcctgccctcctccgccagagccccaggtatccccattttcctgtctgtgccgtacctgtcacgggctcagccggcaggatggcatgagggattaataagggcatgtcggagaagtgcttttggctcccagggagaaaaatgctgcctgtatgctggctacagcagcgcagaggagccctgttgaggcacacgggctgggaattgggcccaaattagcctcctcacttttgaattgaaggcagccccagcgaacacatcttcataggaagacacttaactccccattacctggggatgaggccaaagttccctgcagcctgctaaacgtgtgtcacccgtcctctcacaggtgcagaaaacctccccccgatacaagctggcttcatttatgtgccctggaatcaggggctcagcgctgtagkggatccaggagcttgtaagccagtggctttcacacacttctgcccatgatacacaatttaaaataattttccttcacaacccgcttcacttataagcactcacacacagtggtgtatacggggtacagtgtatgggtaagtgcttggactctggagacagattgccaagttcaagtcctgcccctgccattggctggctgcataacctcagaaaagttagtctctcagcgccttggttatcttagctgaaaaatggagaggacaatagtctgtctaccccatagggtcattgtgaggattaaatgaatgaatggatgtgaaatacttagactactgcctgcacccagcaaacctgttatgataaataactgtaactgaaacaaaaggttcccaaagcaatggtcatcttaaccatggaagtgcwctccaaaatattatagtcggtatgttttaaaagctggtcatgacctattcgacggattccacaacccaatgatgagagtgatgcgtggtttgggaaatatcacagacctgggccaattcctctttcatagacaaggaaacagccccagaaggtagaagtcacttgccagaggtcactcagctggatgaagtccacctcattcttccccccatcccttgcccttcagtgccatgccctcccagtctggccagtgggacagttgctaatgacctctttccttcattgctccccaatcccaacatgccccaaattacactggtgayggtcagtgacaggtttcttatttcaaagccctgcctggccattccttggaagatcagagttgaggagcgttcccctctgcccagcctcctttcctttgaagtctctgacatctggtttcaatttcaggrgtagcgttgctgtttgatgggcagttaccttggagcacccagtacaaacatagtacaaacagtataaacaccgaggcctcsgtgcccgccgttcctccactttcatttacacgccctgccctccggtgcctcattggcccctgggtttaacattctttacaccaatcagctgacccattttgctacctaacatttccagaaactgttctccataggtcacgtggctatgtttgctttycraatttccatctgtttctcacactcatcttcggttcacttcttcatccctatcccaaaggataacaggaaaaataatgggctgggctgagctgctgcagctaaatactttgacagggctgcttcacctgttagttggtttgtgtttcaaataattatgttttgccttactgccccatagtttgctttacaatcgagtttctatgacacagtgacaaacttgaacttacaaattaggacacttcgaggttatttgctatttactgtgagcaaaaggcagacacagcaaagggaagtatgaaaggttatgtgcgtagtatttaatagcagaaaggtgggaagccgaccgtgaaaaagctattcagcgtatttagcaatttcctccagctcctggctttattaaatggtatcctgaagggtgcctgacaaaggcgcctaatcacatacagtagtgcaaaggagcatgtatagaaatgagagggacaaggcactggcatcctgttggaggacagctctgggatgaagacaccaccccaaaacacatggacttgagcaccagtttccagaacccctttcaccccacccagggcctgactcatagctccattcactccctcaatagttgctgaatgaatgacgggcatgagcaaataagcaaatgaataggtgaatgaatcacctagagctgaggtcaaaaccccctgcctgcagccaggtttggcctagccagggttcattgtgtgctacttagtataacatttttaataagttgccaacatgtagagtctggagattttacttagggatttttgctttcttgttgggggaaggaaagggggaaagatttggaagacctggcctggccacactgggccacctcccctccaggccccagtctgctggagccagtcatggaggccacctttaaaccaggcatgtaagatcccagctttcaccacctcctctctctccaaccttcccctgccctcacaaccacgtctgctttcctcacttacagtaggtgtttggatccaggaaacacttgaacttgccacaccctgacctaaagacatagccccaaatcactttcaccatgtagggtctgagcckctttaaatccatattcccgtccatccagtkttgtgcaaacatgagccagagtgtgctttggtccttccttggagtcagcgtcgcctgtrgccccctccrttattgtctcgtggccttttgtgctaaactcggggcctctgctgtggagtaaagaatgtgggtttgtgtccctacctctgtcactgctggttctgcaacccaggaccattctcattctactatggtgatgcccctgacttcgttgacagcacacagacatgacttcagagttccgtgcacatgtgtgcatcttctttcccttctctagagatgtttggcatcttcctcctgctgggttgcaacacaggctgctacagcattctcttatcttcctttgcccttacacagactccaagcccacggtagagacgctgggacccactgtgaagagcgaagagacaaccaccccctaccccaccgaagaggaggccacagagtgtggggagaactgcagctttgaggatggtaagcacaaattgcctccagatggcatgggtgcggactagtcagagtgggagctggcctgtggctggacagggacctagkggtcccccagatcagagatccaggggatctcaaagaagtggtaagagaggtgggggcacttaggggtttggggcagtggctgtttacaaccaatgtagaagcatttggatagtgtaacaaccagtacagccctactggtgtgaacccactagacatcaggtgagacaaggatgactccaaagagaactcctcttttgaggagtctcatttgttgagccctcactatcttgcttgtctgctaaaggagaaccattcttatccttagaattcacagctctgatagtttttcctgttaagctgtgtgtgtatgctacagcsaagtgaagatacggcagtcatctgggtgatggagcgcgatagttgggttaatccagcagttacctgtgacttaattgtgtttccctgtgtctttcaccgccrccaatttgagaaagtataacagtgatgattctataagatagtgcactgtatcctctataactggagtgcagatcagagacaaaggcggaaatgtaaaaaggcatcttcaaccgttccctcaaaactcaggggctccgcatttctggatgggtcccatcacatgggaaattcttttcatttatcttcggagtatatccaagttagataaaaacaataattggcagaatccaaaagtcagtcacattttaaatcatactgctaaagtcaccaagtatgaggacatttataagaaaccacaaattttggaacacctggcattttggctagaatgttaagcttgacagcctcaacttacagtaaattactgatcattattaaatgttcattaaacaaaatgagggaagattggcaaagagactagagaagtgatggagacataaagatataggtagatggcaaaatctgtggaaccygcaagcacagccgtttgacagttagaggaactacactgatggagtggatgactccagaaaatggctacaaagaagaatgggaggaaagccaagaataaatgctgaagttatgtgactgaaaaagcaataatttaatgcatatgctttggggattgtgctttcatattattgtgtgggtgggggacactgttggtcggggttagttgaatacagaattctgacattttaatgaacttgtttttgttttatggagagaagaaggagacttggagaatcttccaagacatgtttcagatagtttgagagccaaaagtggaatgcatagggagttaacatacgatattggatttacagagttagcttgttgggggacmtggagtgggggttctagctaaatgacaatcaaaggaaaaattaagggttctgctgcaaaatttcagaagtttatttttaatatgattttcccgtttcyagtggtttgtttcatttgaggtttctttgatggttcctcccttttctttttgcaaaagttttttttgtagaatttggttcctgagatacagtatacatgtaaacattacagaggatttatgctatattgaattacttcgtatttttgaagagaaaaatagaaattcagaaattgtcaggagaaggggtggtaaaggctaagggctgacttttccaagccacaggttgatgcttctgtaatagattccatgtgtctcttctaaactcaagctgactttggccaagggtgggcaaacattaaatatcctgtcctggaaagggaaggcatttacagggcctggtggcaatcttcctcctccctctgacgccagcagtgccctgccccccatgaggtgagccctcctcacccctagggtgagtaatttgtttctaccagtccgtggctccctttagacttcctaacctgcattctaagccttccccagggaaattcctctctaagaaccctgggaagggaagtgagaagggcagagaccccactttctccctgctaccaacattagccaacatttttccactgtctccgcaggcactgccggcaaacaaccaaatctgggttcccatttcctctttccccacgtccacaccacccccacttagtcacatatttggcattagctcatactggatttttggagctgggtggaacctcagaagaaactctcttggttctgtcttcaggctcaggcaggtgaaccatcaaagcagacaggacaccactgtgtcattagttcctggattcccatagggaaagcattctctacctcccggggtcgcagcctccagggattcagcatgatgggaaattatttttcctcctggccagcactgagctgagaagctggctggtctggtcccttcgatttgctcttaccatgccaaatttcccaccgggcatacctccccatggagatgctggactgtcccagtcttcagaaatagagacggatcacaaagaggtgaagtgtagcaaacaagccttccttgtttctgaggtcactttctcctcactgggcagaacctcccagggatttcagtctctctggatgctaatgggctgccccatctcctctgagagccaggttggcaggagatgagataatactttttttgggagccagccttccaccagggcactggggagacattcttctctggcatttagggaacagcaattttcacatttgtctgctctccgaggtggacagaagaggctgattagagcctgaagccatttggtagcctcattcataattgcttactatgggaaccactggcagacttggctttcatgcctgggaaggatgagaccaaagcctgacccgaaagccagcgatcgccaagatgagttaaatgaataagcaaaggaagccacttctttctctgctctccactcaggccttgccagccatttaaatagtaccactgtggctgttctctgaacccatttcatttgccttcctttgggttattgttttccccttttagacaaagatttgcagctcccttcgggattcaattgcaacttcgatttcctcgaggagccctgtggttggatgtatgaccatgccaagtggctccggaccacctgggccagcagctccagcccaaacgaccggacgtttccaggtaagccagctgtgagtgaagatatgaaagagttaaggccagcttgttccacatacttcaaccccagattcccttacaagcttcataacttcccaccgcacagcaatcctctattctttgcccacaaaccaccacagtctttgctcaagacgtcacctcaaagaatagccagttggtggttcccagcctctcttgtgattacagcacagcctggaagctgggagggagaagcggaagccaagatagaagaaagaggagaaagaaaaaagggacaattgggaggccctaggagatggggcacgagtcagtgtcctcttgttcccatagccagcacccactgctattatcacagagccccttgtcaacttcgagctgggtactgttcctaaaatggctcattgggagatgactggccttgagtttgatttatacgtctctgagggtgccactgcttctacaccaagtcaatttgagggaccaaaatgctgccacacccatgggtatctagcagagctgcctggcacttggcctctagaagagtattgctgtaagtcctggatacattgttaagcccaccattttagtttcagaargccagatttcagaagcttctcctggcactgctgacaagaaggggttgcctctatcccttctaaacaggtagcaagagttgtctgctatctctgctgttacgtgctttcacagcagtatgatggtaaatgtttaacaataggctttttagggattaaaaaataaactgctttttaacgtttgtcactttcagtggtgtaaatacccttaccatagctgagcttaagctaccaacacaacatcaatggagatggagttgagaagtcagtaagagagcattatatagtttttttttccattgtgcaaatacagtagacagaaatgactccagaagtatagctactgataaaatgtattaagataactagcaagtgttgagttttgaggatttgttacctttgttttttaatacaatttattgaattatagctttatataatttaatttttactaatgaatacatttaacaactggcttgcaaaacacttgacaagcagctctcacaagctggtacaccttggatctagcacagcactgagtgactttgaattctcctgtacttctggcctggacctgagacctccataagcactggagaggagaggggtgaattccggaaatttagtagatcastttgccagggtacaataggaaaagkctagaaaataaaagagggaaagggaccttcccttctgcaggcttccttagaactgcttctcaccccaagcactggcgtgtcccttcttcccggtgggggcagtgggacagatgctaggagaacacttggagctggcctcctgacacagtccacacttgcttccctggagggtcacagtgcctgatccggagaaaaacattttcatatttcaagtgtttatctcttcagcatttgagtgctcagagagattaatatctgaagatcaccacagcctcaggcaaaagaagagaacacttaccccagtccagccttaatcaccctcccttctctgttcactgcaataatgtttaattaatataatgagcctcctgcacgttgggaaaaaatacttatttttataacccagcctggatttttcatttcatttccactcctttgagactgcatccaattaattcatggttgttcccaacccccatgttttatctgaatgtaaagaaggtttgtggggtctgtgtaggtgtgggtattctagtgttaatgtgtgtgtgcatgagtgtgtttgtggtttctgtgcatgggtgtgtgtgtgtgtctgtgtggtatgtacctcagcagaggckcttggaataaaaggatatagccggggtcctctgcaggctggggaggttggctggctcttattcagtgtctgtcctcaggttcattctaatgattctggcctcctcccttgactcttctaagcatattttctctgggagtgtctgagggcagccctacccaggccacaaggccaccaattactgagtcacagctccaggggagcttaagtgacctccctttgaccctggcctggacctctgtttcttcacccgttcaccaccgcctcctcctcgtccagtcctggccttcacccgaaagcccctatggttgacctttgctactggttgggaattctagtctttgtcctccttccagttgattcattataccctgtggtttgggagggcttttcagagcaagctcacaaagtgggcagaattccaacctttggctgaatggatggggacagagagaaaattasggccataaggaactgctaaatctaatgttgttcctcccttaagatattgaaagggaaagtaattattttcctattccagaggaatcccgaagtttgggaaagtggcacttataacctgcctccaggaaacaaaatcataatattgttctcagagcccttccctctatcctctgatgactttatgaaccgttctctgtatttcccattttccttctccctacagagcttgatattgggctttaagcaggagaggagagaaagccctttctgttcagggtggtccttacttcttctccataggraaaaaaaaaaaaggagggggaggccctgaggggattggggagaagggaagcagctggcttggttgggggcagagcaactgctaatgggttcagagcggctggcgcccacagagtcagcctgaaagcctgttgtgtgccacactttgccatccacagaggggaccgtcccactcttcacgagcgtgtgccatatgcttcatcccctgatgagataggcaaacagaagtaatgaaatttaagaaaggaggtgtctctgtcaagtgtgaggggcgtcagggtgaagagaaaggtggatgggagasgagctagccgtgttgaagtacccaacacgggccctatgtggaaactgcttacattcctcggatattttctgatttcattattttctcatattttctttctttttttttcctttccttttccttttaagtaagcaattagttctgttctttttggccagtggttgcctaaggctgaaaagcacccactggtttcattccactgtttttgtttttcaagatagtctttcaagccagtcagaatttctgtttttagctctttgcttgtggcttagctgcctggagtgtgttcacaccagcctctggggaccctgttccaaattcagtgacccctgctagctgcggaggaacactcagtgttctctaagaggccactttggctttcctctgtagtgacaatgacataggaagcacccccttactaggagatggcatgtttcctacattctcaggtgctttgaacatagacagagttttgagaatgatcaaagcccagcctttaagaaccgagacaaaaactcatagggcgggcaggtatctaaagctgcagcattgaatattgtagccatgagccatgtgtggcaattttattttaattaattaaaatgattacagccaaaacttcggttctgctgtcccaccagccacattccaagggcacagtagctacactgtattggtcagtgcatagacagggcacgtcactgtatacacggcatcatcacagaatgtattggacaacactgctccagtgctttggacactcacaygagagcaaccaccaggggcccttgatgattctttagttccctggttttggtatgaaccaagaagcaagtaatggagggatgtgtcttctgtgggatcccttgatggagtgttcagtggctggtatctttatagctgtctcattctccctcactagataactacagtaaagtaagcaagtaacatggcattagatggtgtaggaactattgcgattaatcaaaaagagcattgtaagtaaatattaatactaagtaaggtcaataatcatcatcattgtgattgttgtgycatttttattgtcaggaatgagacaaagaagatgaggtaaagggtactaggccaggtcagcttcagaatcctccagtgtgtgttccccctaaatctgtgctcttttattcgtgggttggccttgtgaaatctgattacagtattacttcaatgactttcaatcatgaaagtgatagaaagaaaacaagcgaagctgatattgaacagagctttgactgcctggtcaaagcctatgggattgagggaacagaacctttactctaggctcaaaaacaagctcaaatgggagtaagtcragaatcttaatgttataaaatacccaaattttacaaacagtggctggctattccttcaaatgtaagaagtaagattgttaacacctcactggggctattttgatgcagactgagccattgaatgaattccgttagagtgggagaccttagccatgattcacggtggaggcgcacacaagaagattaagtgaagtgtggatgggtatggtgagtggatggttgcagagaaatcagaggaaataactgatgagtgaatttactcataatgggcttgattttagacagtgagcaagtggtgactgaattgaaaagcaactctgagttcaaaagatcaggtgggaccgatggcagcaaacaatccattgaattgctgttagattgaactgtcttcagaaagaggttgctgtggcttggctggggcacagacactgcaaatccagagacagaacttcctgggctctggaccatgatagataattaaagatcaggagcagcttggctaaaagaaagccaatagtcaaggaataatttcaactggaaaagaaaaggatagaggcccttctttaaggaaggtagaaaaacatcccrggctttgcagaaaaaaataacagcaggaagaagctttctttacccttttttttttttcctgcaaatcatgattggttgagtcccccagcagtgtgtggattgataacgaaggggcagaatgacaagacagcctcaatggcaaaaccttcatgaaagccggcagagtgaaaaaacagctctgggtagattcctgcaagggctaggactgaaaccttcatgtccacaaaatggtctattgtaaaccttgagaacatcttgctaagtttatccaaagtcagtgtttcccttaactggttgctaatttgaggaccttagcagagataggcagaccttggaaggccagctgagggctgactcatgttttaagcrtggactatgcaaagagactacatctcctacagcactaaatattctttcagatggtcgttctagtaggagggcaagatgctagccaggagatgtgcgtgttggacagatggtgtgtttggctttgtgatagccaggaggatcaagctggtgatttatttcagggtttggtgaggtgtagacacaactgattccattgctgttgggccagtcgcagtcacgtgttcacatgacacttaagcagctgaagccagatgcggccgtaaatcgccaggtgaaatatcaagagacctttccagagacagcagcaggttaaaatgctgaatggccctgtcctctgtacttcctcttcacccttttgaactcctgttgttcattcccagrcrattgttttccctgtatcattggcaacaacagatgttttgggtcaaggacccagcgaaatgcctcccaagtatgtcaggtccaggaggagaggaattgtatctctgggacattatttcttcaatctctttcagcaatggaacatatttcctttccattgtctttttcttggaagctgtccattgccggcatcatagccatcagctacaagaacaggcagggctggttcttagctggtcagttgtcacgttcaggcgacctcttgasaatccaaagggctttacctcaaggttcaagtaaataaaaaagtagccccccgcccccaccataccagctcttttgacggtccaagtaatcagtagccactgtataccyagaacatcttstgtgtctgacagtggtgggccataaatcgggagattmcagaagaacaaacttcagttgcagcacgtgtttgatctsawtatctatgtgtgggtgccatgasttaaaagagctgaagcatttataatagcttggaagaagggtcagtggaaaaccaacactgccctagaaagtagacatttgaaccatgccctaggaagtagacatttgaaggggcaagggttcctagggaagcaaagactacgagtcttaattcttcacaagtgaaaatgtctctaagttggaaaacagaaattggctatgctccatcaggggtagaaggaggaaatgtctctaaatgacagcaggaaaactttaaactgaatttaagaagtttctgatggttagggttgtaacctagaaaacacactacagacgtggcctatggaaactccttctctggagaatttaaagcaaagggtggacagctgttcttggatgcttttggcacggttcctccgggaggcaggactggcctgccctaagatcacttgaggtcccactcttgttccaggatcatgtaatattttatttcatctactgtgaagcaacacaaaagacctgtggtgatggaaaacttggggccggctggtttctggagaaagagcagataaggggaaccagtctttgtccagagaacatctttactgccctcatgccaaacatacttctttttgagtcttggattggccttcctgggttattggtggtctttctatcctttttgtttcctagtaaaataaaggcaagcataggagggagtgtgtagagtgatattaatagtaacaacttttcctgagctcttaatgtgtccttgttactgtgcaaagcactttacatggctcattccatttactcttcccccaactctatgcagtaagactgtctttgtatccattttacagatggaaagactgaggctttaaaagcttagtgagttaggctgggagtccaatccagatgagaagctatgctgtggcaggtttactgagtccaatgaggattcaaatcctacgtcactccaattctctgagcctcagtttctttttggtgaaaatggagaagatggtatttattttgcagagctagatttcacagggaaggtgacatcaggggaggcaggtaaagcctcccgtgtgatcgcgcacaggcagcaggtgttcaatgtgttcattcctttccccctgctcttcttctcccttccttgggcttttcctggtctgagtcattccttcatgatgtccctggttctaatcaggcctctgtcagtgacaggcgctttgcagctcagcatctctctgactgatgtctactgctaattccttaaatttacatatcatctttcttccctggagctcatagcacttaacagacaagtggggcwcraatgatttaacgaagtgaaatccagaggcctgctcgtctggagattctgcagactagtggattagctcagatgtcagcactgaattatgatccttcagctgcttgtgctaagcatgtcactagcattaastccctggtcttgcaatgttcccctaaatcatgcatagagattgtcattttatcgtgagagggagatgggagagaaggagaaaggagagaagaggggaaggggctacctggyggggtgggtcactggaaggggcagactgtgaaacctttggcctggctgtgcctggagtttcagtaacaggaagggtaagtagaacagacccagatacaatccattcagcccagttcttcacacttccacacacatttcacttaccaaattctaaccatgatgccatgatttccctgccgcttaagaatgtaaattcacacaagtgacagtatctctgccaaacaattttcaggcagcaagtgggtcttatttgtgaaactgtgaaggaagaaggctgaataataaatctctaaaatctggtttcctttatatatgaggtggcaacagtaagggcttggaaattaccggaagcgtgggagcatttaaagggttctcactggtgtctcggtacactgggtgcttccacaagccaccttgtcattactggtgcacctcacctttgaaagtggctgttggcttgggagggtagagggaattgtgaagggattatatctaagggattatgagaagctagctgattctcctgtcctcatttccaatgtatagcctcatatcattctttaaccgtgtatttatcattctccattcatccattcattcatagaaacaaaattttcttgaggagtggcatatatatagcactatctaggggtagagagaagaagcaatgttaaaccttattatttgtaagaycagcatttacaatataactggggtgataaaaaagacatgaaaaaaccagttaaattataatgccaggcagtgagtgattacctgctgaaatccatggaaaatggcctgcctgaagtccttttaaaaacataaaatcagcagtacagtcagtaaatgctagagttgttgagaaaagaagcggattaatgttgcatgtgccagaatagttaggagaagaactagccaaagggacggggtagatggagtggttcagggagtggagaattacagctaagaggagaaaaagcagcaacgggcccagtggggaagccagtttgcctcaaacagagtgtgattgattgcaaggacttggggcaagctacctgcagagcagctgaaataaagaacttattgcatgaaggtggaaaacctgcagtcaggggtctcggctctgccattgaagttgcctctctaccttggacaaatcactttaacctttctgagcagtttcttcatcatgtgcaaagtaaggttagtaagtcctatctcacaaggatatagaaaggatgacatgaaatattgcatgtaaatgtgcttgtaacctgtaaagcattatgcaagaatgagctttaatyattatcattaacagcagtaatagtaagatctgataggggaagcataggtttagaagatctttgagggtctgatttggcatcagtgtatcctccctcagcagacaccattattaattctcttctgtagacagctgccttttagttatctgtgctgattttggccttgcagaggtcacaccttgtagggtatgtagacagatgtggctttggatggttgaagaggcacaaactggaatcccatatacgcatactaaactggtctcatttgacttcagggaagcatagcttctgaagcactaatcccagagagcctaaacaggaaggrgcttaggggagcagggaggtaggtgaggcagctggggagtcaagaaggaaagagctgtttctgggccactgatgggaggtccagcacaggctcagctctcacctagaaagttgaggtcagcaggattaacaacagcaaagcagtggtccagggagtattgcattgattctaggctctagaatcctagcccatctaccctgacaagtccaggatattcacagtccctgtggagtaagaaagctctgtgcatctgtcccaggttaacatgacctcacactaacatgatcctaaggcatctgacrtgcccacattccatgctgcatatgtggtagaaaagtggccctgccatcttgcagaagtattcagcctaagacgcccctatgtttcagggccaaaaagargtacygagatttcctcaccaaatgccaccttgttctctgtacaagtggccagaatggtcctgyacaagttggatttgaaggtgcaggtcacacctgtgttctgcaaggcacgtagtctgccaacagcaacaagaactcggtcttccacatgagtgtctgatgaatttgaaactaatcagccaaaaaggccattctccaaacatttggattggtaaacccttaatttcccagaacacatatattctctgctaaacacacagcctttgttaatgataatgacagcacctttatcactggagccatatgtgcctggctgtctcagaaaggccaagttcaagcctccctgaatcatccctttcagctcccaccctctgttctgtttgaaggtgacactgggcttctgagtcacagtcactagagcccaagcatcatctaggagcactgatggagacagaaggttttaaatgtcagccatttggacagtgcccagccaagatggccagggctggaagcatcaaccacctggtcatagtcaccctccaatctagcagccccccaccccctataatctgtccccttgtaattcagttcatcagattgcactggccctttgggtgagttaatgatgaataagatgtgggtctggcctctcagaatctagagggagaagaagggcacgcacacaaccagccaagacataaggcagctgtgccgggtgctccatgtgaaagagatggaaaggaaatgataccgagaaayaggcaggagggaccgatttgacttagagactcttaagaaaacacagcrtttgaatcaaggctctgaaggagccttaagaaagggtcacagagcctggagaacaaggacatgaataaaccaaagacaccgaaactcagtcccaactttcccttggagaggccacagcagcacactggtgtctttcccgagtgtttatggagaacctctgtttgggtttgtttctgccagatgacaggaatttcttgcggctgcagagtgacagccagagagagggccagtatgcccggctcatcagcccccctgtccacctgccccgaagcccggtgtgcatggagttccagtaccaggccacgggcggccgcggggtggcgctgcaggtggtgcgggaagccagccaggagagcaagttgctgtgggtcatccgtgaggaccagggcggcgagtggaagcacgggcggatcatcctgcccagctacgacatggagtaccaggtggggtgagcaaaaagggaatcttgtgatccgtatttcaatatttcaagggccgagcccattcatcgttagggaacgtggttaagcgctactgttttcattgtgtttctcacgttgccatggcaactgaatgacactcttatttgttattcagaatatgcctatctctacacccagacttggttctttgttcctcctgttgccttttatattgctgaaatcttctccaacaaatgtttctcctctccattttattttagattgctatcaggtaggctgacaaagggacacagaagccagagaaataaacacaaacaaaccctccacacacaaggaaagaggcctgtggagccccttcagatctggggaggaaataggataatctcccagacctgtcccaggcagcaagaacacaggaaggggagcgggggctgttggcgctcagtggccggcagacatgagaggctccagagtgagtgctctctctctctcaccagctcccggaatggagttctgttatctctgccccacagagcaggagactgaggcacagatgggtatgttcagccgtggttgcaacttgggtaggagtagacacactgtggaagaggtgactgagaaccagccaaagcattaaccttctcctccccagacgaggagcagcaacagatggctggtgcrgcagccaactgctcacccagcttgccagaggacatgtgctagtttgcagagaggaacctggggagggcgagcatgagaaatgactgaagaccacagagccgaggggcttctgtgtacagcctgcagtccctgtcccttgaggttgcaaggcatcctgagaccttccccacccccatctgggttcccacttactcacctgagtgtgttgtattgtaactacctgtttgcatttgtgtctcagccattagatgggtgagcttctctgggcagagatcttgtcttactaggttttgttactatccttatgtccagggcatagtaggtgctcagtaaatggctggtgaaaaaacaaattcttttcctcctagttgtaataatgaagccctaaggcaacttataataaggagcacaaatcaaaacctatgtgctgtatttctcacattacccccacctacttgtgtcttctgagttttcaaatacctggattgggcatttgaaagatttatgagacaggaacctcgaaaatagtgagggaagtttcaacccccctttcaatagtctctgattatggcccttttaatcaatacattctagttactggacaacaatatccacccccttgttatattttcttatccccttaaatatgcgtttgatttgaacaaactcattttgaattaagatttcaagagctgtagccatgtggtcaacagatgtgtaccaggtgcaataacacacacacacacacacacatacacacacacgctttaagctgcagctaacagaaacttggaaatccttgcaccgtttggactaggagactcagttaaccatggctcttattcttccggcttctagattgtgttcgagggagtgatagggaaaggacgttccggagagattgccattgatgacattcggataagcactgatgtcccactggagaactgcatgggtatgtgaatatctgtctcttcatggttctttcaaataagaccccaagggctgggataagcaagaggaggcaggacaccattttccaatgcagtcgttacccagtgggtggggcagccacagtctctgcaaggtaaggtgtgggtgtagttgtgtcttargctgggttcagggtgggaaggggtgtgaggtaaggggacggcttatatccctgttcccaatcagaaatagacatgcactaagtacatagaggttcagggtgccaagaccccctcagcaaaccccagcttttagcaaagaaaatgctagaggacgagagcaactgccagtcaaaattatatgctggaaaggtttgatggatttaatggaagccttcactggtgagcaaaaatagtacatatgttatgtaagagtgataacacaattacctgagtagttattttacatgaatgaattgcagagcaaactgtggcatttgaagtaagatttcagatttttctttaaaacgaatacctctaatgcccaagatcccaaagttgttgtaggattaaacattgcaggccaggtgactggcacgagaaggatatcataacyatcatcttggtcaaaagcacctgaacagccagtccacctgagaggcacgcattttcttcagggtctcctgctgcagatgaggtcaccctggctgtgtcccatcagagccatggacatttcccaaaccaagaaaggaaccctgagaaggcatgagggttgctttcagtcagcagagtggctgcagtaactcaccaactgcctttcttggcacacgacccctggtgtgtgtgtgcttgatgatgtcagaagcacctgggaccaccccagtccctccgggcaactctcaggccccaggcatctaaaagtaatccaggctctgagaaagtaatcagcagtaagtaactgattacaatactttagggacccatttcttgatgaaggactttttgttccaaagcaactttgagaatcccccctcctccgccatcaccaccccatgatgatgatgtgttagagccagcctagaacatgtggaagatggggggccctctccatggagtggtacaaaaaaaccgagtgcagtcatgtttatcatcatattcatccaattattcactctatgttcacccaattgtttcttgcctttaactaagtccaattttttgtttgtttttttcagaacccatctcggcttttgcaggtgagaattttaaaggtaaaaaaaaattttttttttgcatgctttttccttcccccatgtgatgtgaatttgatggggggaatcaacctcmaaatttgtcaaatctcgcaagagaaaagagacgccacaccttcctgccgctagatggcactagcaacacctgtagatgcgggaaggggattgagagcctcactgtctcttgtttaattaaagtttagaaacctattaatagagacaaataggttacagataaacctttcagccttgcattgtccaacggggagcaatgaggctgaaaatgcaggggtggtgagaaaggagagactgtgggaagactgaaccaaaaaaaaaaaaaaatcagtataaattaaaagtgaaatgaggtggcaatgatttattttagcctgaagatggtttctttccagttccagggtaccaaggcagcggtttcagttaaccacagagccgaggggcttctgtgtacagcctgcagtcagtacctgcagtcaccatacctcagtgaggtacggtggcaggctgcttgtaagagaaggaagttaggaaagagacacagaagtggtggcctcaggagaaagagttgccacatttaggacccggtgtccagtcaagggaataaggaggtgcattcgatgactggagctagagcactttaaatgcaggactgaaaatcagaaaggacgtgttctcccccgagaaagcagagagagcagagcaaagtgagaagaattggggatgcttgcctcatccaggttataaaaaaaaaaaaaggcctccagccttgggtgatggcaatgttgtttgtgctgttacaatgcagcagattttacattttgccctctttgcaaacctattagcggacactgctgaagttcccacaccggtttctaatgccaaacatttaggagccactctaaatgcgtcactgcagttggcctgagtgtaaaagcacacacaaaaacaccctcaccaaatgatgggggttcttcatgacctgtttgatgccagcaattgtgaggattgctgtgccctctttgtactggctgggcttacccctacaagtggcagcattgcagagataagggcagccatttttatatctgccgtctagactcgttatcttcactctcattaatctgtccagctctgggctagaaagagatgaattcctggtttgccacctagatatgctccctgactccaaatcatctcacccaatttgccactcatcagctctaagacagccagtgaggaacaaagctgcagacgacaggggaatgacagaccgacatagaatatattgcctttcttacccttcctcgtgtccctgaaccccatgcccactccctgtaccacagttctaaaagtattaagagtattcatgtgcatacactggtgctctctgggggtgaggtttatgttaatgtaaatccaaagtattggaggaaagctgagagccaaactgaacgactttggattacagtcgaattcgagttctaaccttcaggacccaaggtaatgcttatgttggtgaagtgaaagctgtggatgttgtttcgcctgactctctttgggttgtggagactcacagctcccagaaaggctgggtaaagacgtgccagcagctgctgcagacactgttctgtgtgcacaccgtgtcgggccatgactgacaagtacagtggctaagtgctaagtgcttcacttccgtaagagaataagcagaccagggcacgtacactctccttgaaactgtgcttaccatgaggcttcacaggccagtcatgctctcttgtaaaaaatatatacataaaatctcatctgagcagcagtgctcatttagccaaaataaacacagggcttagtaacttgaaggtaagaatttccagggtgctcctggtgggccgctttgaggctaagcaaaggcagtgcacaagttgcatggattaggccatggctttcgtcctggaggatggcaagcatctttgggaagaagaaaccaaggcttggggagcagagacttggccaatggacacagtaaagagcagaatctgaattgggaatggagaatttcattcaccttggcacgttttacatggagatctgagttggtaaccagatgaacctagtgccatgggtctcttctttctggctgagacctgtttgaccacagcatgcaactctgccttgagcaaacttttctgtttgagagaggagaggactgtgtgttccatctaacctagtgactcatatactattcctcttatggtcaggacagcaggagtcctctcttgatcmgggcataaaatcagccttttcactcaaaaaatggaaacagagaaatcagggggcaggcaaggtatggaaagttgatgttgaaacactgccaaccataggcatttacattgttatacatttttcaaattagagtgtttttcttttcccttataaattaatcatgcaacaaaggtaatctcattctttgggagcaatcactgtacaggtaaatctttagtgaaatacaataaaagtggcctttggacctggagttattagatggtcgcaatcttttatatttggaagtatctttcattttccgcctcttactgatttcttgccatgcaatattattttaaatttaaatcatcctgtgttttctgctgtgtgtgtgtatatacatacatacacacacacacacacacacacacacacacacacagacacattgtgtgccaggatgtgagtcagtaatgaagaaaagcctggaagaaaaagagatctgtgttgagaagggagaaagagaagaaagaatgaataaactgtgttgtcatgtgattttttaaaaagacccttttttgtggttgttatgagtcacattttaaacaatgtagcctgggtgtgcattcttttcttttcttttttaaagcagtggctataaacatggtgccgtcatgtatctttttctaggatttgagctttaacaaatgaaaaaccgtgtgtataaaggggggaaaaagaaccgaaaagtggtgtaattaaggtgatggattatttcctcttacccaatactttcttttttcaataaaggaaacaagaacaataaagaagccagtaaaaatatatgaagcccataatcagagttctggggtttgttgaccaggtggttatttttagcagctcaccttggaggcaagagtttttgttcgtgttagaggctgtggtttctgagcagagcacgggcagagagacgatctggtgccctacctgttagagactcacggaaatcccagctgggtgcacctgtggaaggtggttgtcagaggraaggattcagaatgactgtcctacgctagtggatgctaaaaggaacatcaatgtctcccgtttcagctgggaatgtggggtttatgactcagaccattcctaaggtccaggggccccatttctcgggtctccctaggtgcctttctgcagttctccacagttctcatccagacaaaaccaggagaaagtgcacatccacagctgtctcttgggcatagaggggagcagtattaagagaggcccattttgggggtaatgctggctggcatttgactctattccttaggctttaagttctgtttctttggtgccaactggccaatctctgcattttgcacccccttctctcctttcccattcccaccctcaccctctattgcctgcctcccaaggctttgtccaccagggtaaggtcccccatcccagggcctggcctcacattccctttctccctggactcccttcctcccacgcctccttctcctagaagcacttctgagatgcagagagggttaaatggtgcttttgcacataaccgtctgatgaaaggcagagaagtgttcctaacccctgccggggttccagataggcagctgtagtgtgtgaatcctcctccttgcccccacccccttatgtctccagctgccagattaaggctaggtgttgctgagcaagaaagcatggagatcagatgtgtgaagcgggtaactgcttggcggccatccttccccaggggacacagaggtgttctttgtgaggttcgctggagcatgccacctctcctgctacagaggcctgacacgtcccctctccatcagtttaccactcatgtaaacaactgccgaggccagcttatctatgggtggaagaaaatgtttttcaccaacttttctctccaagaacacagggacaagactcagtttacagaaagtagcataagtgccaccaaagagtgtgaagcgtccgagacttcagccagtcagagatctgaattcggaggcatttaaaaatgcctctagatgtgggagcaatccacatggtttctgccaacttactgaaaacatcccggcgcctcccgccacaccatgctcataaggcagatggaaagagtcgtttctcagggatgcctttgtgcttgtgcgtcttttttccaaacacatcagagggcgtgaccacattcttctactatcttctgtaaacttctctagaggagccaacctttttcgtttgtttaatctcacaaattaaataaamctttatgtgaaatgttcctycaccagcacttcatttttaacctgtacagaaaggactgtgcagacaggccagtcctaaaacaattctgacatgcaatgagccttttttgaaagagaaagagagaaggcttacccttggtgtctttcaaaacacttcttctggaaacctgggtgactcccccaggtccagatgatatttcataaagcagctatagtatatgctttctcatttcagagattcagtgagaaactgacttgactgagacacgccaatcctcagacaggttcagacagaaataggaggcagaaaggaagaggactgtttcctcttccctccctacttggttagagcaaggaatctgcaaacttgttctgtaaaggccagatagtaaatatcttgggttttacaggacatacagtctctgttgcaagtattcagctctgccattgtggcataaaagcatccataagcaatatgtaaacaaatgagggtgtctgtgttccaacaaaaattgatttacacaaacaggcagtgggctggatttggccmataggccacagtgagctgacccctgggttagagcacaggctgggattttgtccacctggttctagccgtgactctgacacttgctagcagkgtacagttcctcaggggaccctgggccatctcttgggtttcactgaatgcttctctgcccttctccacaattatcctccaagtgaaaccaggagaaaatcacttgtcctctcaagtactcaggtctccctttggagggtcatgaggaataaacaaaattgattcatgtgaagcccgtagaccaatggttaatacacaggaaatgtccactcagggtggccgttgttacagacacgtttcccaattgcatagtgaccctatttgcagataggaatgaccggaacactacctcatgtgtaactgtttttcttattttctcccatgcctggtttctcaaactttattgtttctcaaaattcaaattctttgtgtttgcattgcttttctccagggggctcagaatttttacagatgggagcctgtgcaaccttgcaaatgcacttggagttcagttattgactatttaagtatctgtttctgattatctcacacaatgggaaaactttgtagagaatctggggtgggaattaatgaaaaatagttcaggaattgaaagtgttttccaggtgaaaaaagacatgtgagtaagcggtagaaattagatcaatcaaagggaaaattcaggtcaacagatcaaccaactccaggcaaggttgaattctcacctacactttcacccacctagcccaggctccttttttgtcaagcaatggctcgatcacccccagatggctgaaggggcaagtgaagctaaaattgcacaactcagcaattcgggcatctggtgcaggtgacatctgcctaaagtgggcacctttttctaatttcccatagaggtgccacatgagctagcaaaatctctagcactttctgaaaataactctccagggaagtaccagtaggtcatcaacattttccagggagtctgaacattggtccaaatatattcccctatgccatccgtccatttatccatccacctatctattcatccatccatctggcattcattggattgctgatgttgtctgggaaggtgctttgggtatggatttaacccctattgatttatcgtcttccttttctctagttggcaaaccacagcctcattagcatacagctctccaaggytggaacagggccagattctaaaccagcacactccacctgcctttggagttgagtctttttagctagtgaatgttctgagaaacttctagcccccagctgcaagtcaaccaagagttgcttgtaggggatcaggaagggtttgctagtcatatcctctcttttctaacattaacgttatttctaacctcttgacattaaaacatgaattcacatagtactatttctcatttctccaaacaaatgcccaaagaaaatgtttaaggagccagtataatgtcccccaagtagcttttgtcactgaagttttctacatgttgataatttcaggggagagaaggataagtagagaaggagaagagggtcttacttaaagtggagtttgtctttcaagtagagcaggattctgagagactatgtctgtgtctctgattctaaatatgtaatccatgtactaggatttcaccttcctccagcaggtccccttgattctctccattgtgccctaacattgtctcttatcgtaagaaacactgtaagagaaacatgaaggcttcatccttctccagcctgagcactttaagccataggttgtgtattttgtgttggaaaccagcattttggctgaaggaaagcagacttttgaacaaagatgatgtagtgatggagggaatgtgggtagttgtgaccatgttctgcttgacaaaaatttctgctcccacctctgtggtctggtcaggtacttctttagagggaaagctaatccctgaggatttatcacctcccttttcttgatgggtgagctgcagcctcattaggggatggccctcactgtggagccacatgaaaatcagagacaaaccccaggacaccctttggggagagaagggatgtctctgaggaactctgggggcatcccttaacactttgatgtttcctgtgcatttttgtaagctcatatcgaaaatccagcagcaggatggttgccaggcagcagatcctcttggtgacctgaataatgaattgacaccagttgactgtgacttgcaagctggccacttcaaggagccatttccagcaccttgctttctcttcctctctttctatgcataatttccaccatggccacaaatatgagagagagagaggcctttctcagctatggtaatgaaactagtaaaagacagaattagtttggggacaaagacaaagagggyaggcaataaggtgggagaagaggaagatgtataaagggacattcaggggatcctgggattctggggtcatttctaccccaggggttgtggatgtggctgtcaaggtgtgtgcagagcaacacatccttgtcaaagctctgccaatgttgtgggacttctggtcacccaagaggtgccaatgaacctgcaccctagcggaaggggattcatacagcaggagaaagcagtgattaagagctaagaagttgagcaggctttgaaatattttccaagaaaaatgttctcatttttctatcacttctgagaagacattagaaggtctgacccacctcccacctattccccagatcaaagagaggagttctgatgttcaggctgcaggaattagagaacacagactcagaaataggagtcttagcctcagttcagtgtttgattcaccaagcatttattgagtgccttctttgtataaacccttaggtatggatgagagcaagttcctcatgatgagagtgagttcctctgcttaaggagctctgaatcttagggtgggtagtgtaaggaggcatgaaaatagaaatgagccccgtttgcatcttgagcagagggggaccaccctctgctcacagggtaggaccactaatgcatgaaggagcccgcagcacttcccacccatggctcccctgctggggcaccccatgagtagagaggatgcatctttccrgcttaatgcaaacagctagggaggcatttttcataggagaagcatatatcatttttcagaagtaaagatcatgtctggttttggcaagctcaaaagctcctagtccctttctgggccagattctcatctgatgtaaatctttgggagaatcaagttgtaacactgctttgcatcaagtgggactccagccagtctttccccagagttaccctgggcttaaatctactacatcatctccatagcaaccggcagcggccagtgaacgtggttgccttctaaatactctgccagcttctcttccctgctctgtcttttctgtcattaagaatgatttccctccctctctctctcactcactcactctcgctctcacataccctctgtcattttgtgcccacattttttttgttgcaacttcccttccaatctgcttttaaaaatcctccatccaattaaaaaatgaggatgcattagtcatgacttaacagtggtgattgacctgtctaggcaagaccaggctaatttcaatgggcacagaagccttggcaagccaaagtggaatttaccttcaagtctagccagcttaattaatacattgttgctgagaatgctggccagccagaccaaatatggtgtttccaccactcaggaaatctgcctcactgaatccyggaagtcatgtcagcatcatttacttgtatgtatttgtgtatgtgtatgtgtgtgtgtgagagagagagggagatggagggagaaagaattagaacacttccatatattataaagtgattgtggttgaacagaaagaraagagatgtgtaattctaccattcttggttgaatcccatacttactatttaactagctgtataaccacttaacttaacctctctccacctctgtttcctcatctgtaaaatgggtctgacaatagctacctcccaagggggtaagtaggaaataatgcaatcgttgagaagtgcttggcaggtgctaaggactgagtaccaccttagtcccccagacccttccctgtatgtcccaaagcatgtgtgtgtttctttctttttttaaattagtcttttgattagtctgcatgctctcagcctagcaacactcttctgtgtctctccaccagggggcaccctcctgccagggaccgagcccacagtggacacggtgcccatgcagcccatcccagcctactggtattacgtaatggccgccgggggcgccgtgctggtgctggtctccgtcgcgctggccctggtgctccactaccaccggttccgctatgcggccaagaagaccgatcactccatcacctacaaaacctcccactacaccaacggggcccctctggcggtggagcccaccctaaccattaagctagagcaagaccgtggctcgcactgctgagggccgaagcaagaacagcacccaaaacaaacgagaaagactgcaaacatgttgcctcgattttgcacttttttctcctcgcctagtttctgtgtgaactctcagacatctctttcccggatccccaaccctgagcactcttatcaatcccaaccatcctccttgggttcattttggtttctggkttttctttttcctttttgttgattccaaaccaacaaacccaactctaatgctgcatcttggactatccgaagagatccacccccaagcactccacaactcaaggctcagctggttttgttccagagactggttcgcttgttttttccccttgccttatcccatacctcctctcagtgggcagtctgccaggagacgtgaggggaagcctggatctgtgtgtatgtacatagtagacatgtgtgtgtgtgaatagctctctgtgtgtgggtgtgtgagagagcggctggttcattgtgtgtgtgtttgggcgaggggtgagtgttcagagagggcccctttaactcttatgttacttctcctggggtacattttacaagaaaataatatactgtacaagttttgtttacttggagaagagattgaagctttttgttgccttatctagctctggctgggtttctgttggctgtcattgtcatctccaggtacctaaagaaatagaggccacatgggatgcagtgtggcttctcccatccctatccccaacycacctgacccaagagaaggttcccctagcacactcaaacaagacccccttgtcttctggtgtctttgaaatgtcaagataacagccactgggtgtctgcggaaccacctctccagccctaaagcaaatctgtctcatgttgccttataaaagagaagctcataatgaatgtttagcctttatcagttacatccaatcttggaataagtcatagagaataacaagtctgggactgaygtaggaaaaacagtagtctgtttaagttgagaggaggaggaggtggacgagagaagggaggagagggaagaactgaaatgtctcctcacccagggtggttattgggcccaacttggratggggttgagtacgaaggttaaaaaacatatactttggtattatattggtcattgtaatagcagttgtaaaatatggggggaaaagggatcatttgctttcctttcatggtgttaatgtgtgcctgaatctatagccgctaaaatgtaaggctgtccacctgacttatttaaatattatcagagaatagaaagtaatcactttttaagtgtacctatgtgctgccccttaaaacattcatggcatctggcaaatagacccttgtaggctggcctggcatattcagatgttgccgcatcatcacagagaaggtcaaatgaagatgtaaccattgctgctcatgtgtcttctctaagcaacaaggggagcgggatgtaagagagaagttgctaatgatactgtacaaaggatggattaaataatgaagtcaatttcattgatagaaaatgcaaattttaagattctcagtgtatgaggtctcagcctcgggagcatttattttttactttcctgctaaaaatccactggggaggtataaaattcactccaaagaagtttgcctgggccaaaagcctccaggttccttctgagaacaaaatactaatgattttttttttttttttggctgcttgggasagactttcagcattctttcacgatatccagatatgtcccttcagcacacacactcaactttctcatctggttcgtttcatcctcccgaaagaayggtgctctcccactcttactctatttcaaagagctactctgtctcaaccacagcagccctgccaagaaaaggcaagatgaaaggctagagcatgtgctaccttgagatttcaagaagtgtcctacctcagctgargatggagaaacggggagtggagaggggatcagcccagggtaccatgtgatgactaatatgccactcattaagggcttttacctcggctgtccacatccagtcatgcatttggggccaggcatgcctgcgaaatgattgacattcctgtaggtgccccatagaggtgtggcattgagaaattatgtctggaaaatacagccagtgtagtgaccagctgagttaccatatascctgatgattccccttctgtaacagaaggtgacaacaactttgtgaactttctatatctttatctgatgccccaagtggcatcwtctttatgtacatgccttagttgagaatatgagactgctctaatctttgtgaatgccttcacacttcagctgaggatgtcaccttctctgtcactccccatcctgcaacctctgcctttgctctgtctaccccagcaattttcatagtgttatccaggtactgtgctaaaaggtcagctcttctgtaaaatgccatgcttcgcagcttcaaaaagcaaaattctgtatttcatggagggagggaagggtcattctcttctaagaaaaatagactggacaggcgaatgcatgcatgcatgtgtttagagttgcttctcagaagacaaagagatgatagcaactattaaaatatgaatgaatgaatgagtgaatgagttgaaggcctagctcgggctgataaagcttttgccttagtagaggttttatgtcaacaccttcaggagggaagcccttatttctgggttgaactccccttccatgatattatgctagcaattgccatcacttagttcctggcgaaggcagaaaaagaaaacaaaaaatcagcattgtcattgacaaaactggatgctgaagataaagtaaaattgtcttttcccttgtcccacatttttgggattaaagccagaattgaataggaaatacagtactatttctgaagttgatagccgatctttaagaagaccctgtctttaaaatgaaactagcaggcaaacacctaaataatcgaaaattaccaaagaacaacaacgaaacaagaaaacctaaagatttttacttcctattcttattcctttccttattactgtgacaccccttgcattgctcagttgcctgtgtgtcaaaataacttgtggacgttggaaattatttgaaaatgtattgtgtggaatgtaataaaatgatgatatttttatacaaacatgtgaggttttttttccctttgcctgtgagaacaaagttgaaatgtaggctttgagcaaactgatgcttccaaagtttacacatcaccttctgagctacagggcatttctgtgggaggtaggtgggttttctccttgaggctgaatgccaacttttccttctttttatttttattactgcttgttaggatttttatccaatttgtgcagctgagacaacttttatgattggtgtgggattttgcaaaagttgctaagtgctaaattgctaaatgagattccacgaaatttctcttgatgacaaatccctggagattagattctactttcaaagsgctccgggagagtggtaccagctaagctgaatcctgtacccagctctgcagagacagatcacttcctttgaagaarcagcagtgacatcttacccctcacctacccaattattacttccacagggatgtgaatctcccatttacgagcgctttcccagacaaaacgggaacttgtagcatgttcagggctgaaagatattctagacttcatttttgaacaggtaatgaagataattagatgatgactgtggacatagaactatcagagtggaacattttatgaaaggaacactataaaactttgaggagaggcacttggggaaacttactcagaaggccaggtctttcttgatgagtatttttctttggtcctcctctttagatggtgaccyagttatataaaatatttctatcagaagggaactgggttgggccaggtgggggaaaatctaggaaaggcagcctcccagcasttcatggtttctagatagtggtcaagaagaggtcacattaatcctatttgcagataggatttcccaccaaccccattcatgggatttatcagaggccttctgacaacctgggagccctcctcaggggtccgagaaccatccttaaaggtcctgagaaaatgtacatgttcagaagatcctatttctgtcagagtcctgcttttcatcctatccaaacctagatccaggaaggagtgctttttacagctgtaaaacctgtccaagtgctgctaaaaggagacaggcttccggtttttagatcttacaggaagttctgttagtacagatggttcagtatagatgtcactatctgtcccttgcaggagaataaagtagaatgtcagtgatcagagcattttttgtktccccagtgacaagctcaattaccccttttgtctaaataacatttggctttccttaaagccatttgttcccattagtaaagaatgaaataaaaatatctcaaaagtgttgatttcaaacaaagacccaggctcagtcaacatttccttgagctgacctgggaccaaacttgccggactgaactaaattagccatcacttatgctttgttggcattactgtttttggaaccatgtttgggaattttcccaccttggttctagtcccaagacttattttaagggtacttactccccctaaaagggcaaggactgttaggactccaatcttagatgtcaaacagggcactgttaccaccaaacactcctcagtgtggcatttcttatgtagcccaagcataaatgttcagaaattttgtttccatggatcataaataccagatgtcaaggcctaggccggtctgtttctgctcctacctggttctttgtgatggtttcagtgtgtgttctctcttcacccactgcccccctagctcagataaccgaaacccagccaagctgaggtggcacagtgtttattttccttgcccctcttcacggcctctgcagttgttctgcacaaacgtgtggcctttctgtaatctctgatgaaaagagctacatcctgaagttttgacttgcctgcattgtgggctacacatctgagccaaactgcagatctgtaggtgaaggcttgttttttctctttaattgtgcagatcactggggctctcacagctgtaatttgcctttcatacactttagtgacagcccaaagaaaacacaaaacaaatccaaccagagaaaaagggagggggcgaggggaacaccagctgatgatcttacaatcagcagggaaaagaattgcctcatacaaataaattagtagctaggaatagtgtaggatttaattaatcctgacacagatcaggtgcaccacagtatgtatagaggtcagatacaatcagaaacccacacccttaggggtcttcaggccacaagcctgggccagagtatgtttgccctgactgcttggaggtgttctgtttggacccaaacctaaacactgaagagcgacaagatttgggaaatcgccaagagcaaaaccttatttagcatggtatggaacagtggagaatctaggtgcttcagcacaaccaagccgaagccattctttccccaatcccagtggataacagacctagaatcatctcctctctactgggtaaaacagttgttcttggccttttctgccactgacccctgagagccccaaaaagctaaagtcccgtgggcattggaccaagaaataggaaagaccatttgaacagtcaacaacagaggtacttgagggaggactgagtgttatgtgggaaaacctcttttctcggagtttcattgcttgagagtgtattgatactgatgatacagggaggctgctggagggagactttatagtaactggctgggtttctttaactcacaagttaaacatgctcaaaaagtgcaataatacagaaaaagccaaagtcgatttcattgttgaccaatcccagtcacctccccagaggtaactgtgagggatggtttgaggagtatgtttccaggccttgttttatacctttacaaacatgtatgttcatgttgagttatgtggtttggttaagctggggtttagtttggtttcatttggttttgtgtaaatggtagcacagtgtttgcttactatattggatgacttgcttcttttcatttgacatcttgagggtaattcagtacatactaatgcatctaccccatcctttatatctgcagcatagcattccatattgtgttgatatgccagagtrtattaactgctcccctgttgatgagtgttcagactgtgtctagttttttttttttttactattataaacaatactgcaatgaacatccttgaaattgcttctttgggcacatgttttacaaaggatagaatttctgggtcaaacacatccctgttttcattttagtaggtgctataaaaggctgaggtttgccgtttaaaattaacctgtccctgcttgagagcatagcagaaactagtggacgtcctggctgtagagcccctgccacatctgcccaacccatgtgatctctatgcctatctctctttctctacagtgggtgtgttgcttgcaagagaagaccttgggcacttttagctgaagataattttaaactcagggagtgtttcttcagaaygttcttttttttaactgccaacttacggggaatatggacctggctctaagtgtcagctccccagagctgtggtggctgtgtcactggagttaattctgtccctgggttcatcaggcagagtcctgttctccatgattaatgagwtccacttgctttcttcaaagaatgcctgtgctgtgccatgctgttatttatttatgttttctactaaaaaatttaygtaaaaaacatcccttaaggtcagtatgcagtattgtgctgcagactaaactatcccagcagccagaggtaaacctacacaccaagaaaaagtctcaaatttgagaggccttggaccacaggcccccacactggccccaagaggggcagaccttgtgggcttccttctgaggaagttcagggctgcaatacccaaaggaaaggcactaggcagtgaggtggttttctagtgggatgtttataggcataggcaaagctactagcccccacaggggccagtagcaaggaatggcgggtggaggagaagcccagagacctgtcagtccaaacaccatttctagcaaaagcactgccctcatttctgtggtgtgctgagagaaaagtgtcataacaaagtggctttgactttgaacataatggagtgtgtgtggctatataggtccagtgtgtgctttccctgacctgccaaaaatccaggaccattgcctcctgggcatgaggtatgagtatttaactcaggaaagaaagcagcatgagttgagatctggatgaactagagtgcatctctctctgacacacacacacacacacacagtgccttgttttgtcttctctgtgtaattgcgcaaaattaaatcctttaaatatcacgaacattccccaaaacaaaggctctgctccagaattggaatgatagtataccatgccacggctttcagcaataccagtttctttctccagcagcaggactcattaacaggatgcctggactggacttccctgcaacttattaaagagcagccagctccagtaacgatgggtgtgcagaaagccttgagctagaggcagccttgaccaaagtctcattctccaaagcctgctagttattgaagcttcatttaagcacaaagaaactttttgtctctttgtgttttcttgctgccacccagggcctgcgagaacaggcatgaggatttcaggggctggtgtgggcctccccatggcttctctagggcagccccacagctggcattgagagtgagatggtagttattacaacctagatggggccaacatgggygtgtgaaaggagccccagagatgcctcattcgccttggccaactgtggcctaagaggatgagccccatattagtgtttacaggggtcctgggcccacaaacccaycactgctttctggctctgcacctcctgatgtggctagggtctccacctctttctctgtggaggagctggtcaccactcatctgcctttgtgccaggtgcagtttgtctccaacctccaaaatcccctttctgcaccttccccttctcttgctgaccccttttcttctctggcatccttacactttctctttcccttcatccatcaatgccttcttcaaaaaagcatgggtcagattccttcacacaaatgccgcatggctacttcctccaataattgcatttttacaggggaccacacctgaagccaggtctcttagtaattacggtccttggccaccagcaagctrttgggggaaatcatctcttgaatgggcagagagaggtacatttttggtagctgtaaartgatatcacagagtcattcattctcattcattcttgtgttcagaagaagagcccatcttttaagtacagtgaattctgttagtgacatacaggtgtacagtttcttttcaaggacctacaaaataaaaggggctatctttcagaagatattcttcttcacattggaaatggatgcagttttgattcttcaactccattttctcacttgtccaaggttgtaccaaaccactccatctgagtgacatagtgatgtttctaacatccacacctcaaatattggaactagaggaggggagaaatttcaaagcccactggaaaaaaactccctgaaatatgaagatacatgactttttcccctagcatcccaggaaaaaaaataagactacacaagagggggaaaaaacagcaggttttccttgaaatgctctgtttttcccaccctcatgccctaagagaaggtagccaacaaaagaaatgaaaagagccaattgcttgttcacatatctacttacaacaatggagaatagctgatttttcaaagacttggggtaaaaaagaggttctagaattttctttcatcagctttgctgtgtttttccagtctgcacaattgtgaagcctatctttatagccaaacatgtctctggctgcatttttcttcttttcatgccattgttggggctcattggagacattctggcctcagctgctcatccgcctccacacttgaaagtattactaggtcatttcacagtcttcttgtttgcagtcagtatttccaattctttttagtgtttccttctagttattcaactaaaaataatagaaacgaatggctaaattcaagatcaaactcttccagtaatctcacaccaagccccctccttttttttccgcacttgaaaccatttgaaaaattccaaaaaatattttttccatgaccgtgcctagatttggctgtagcccaagagataaaagcctgtgataaaggctcttctgatggtgcttctaaactcaagccaaacccagcaaggaatgaatggctctcaagtagcccgacttcttaacagaggagatttggcaaagtttagatcaacacctgaatgtttggctccttattgcaacttggatgaacaaactgaattgggaaattaagtgtggtggggaaggcggaccttcagccaatactaaatattaaactgaattaaaccgaattttgaagtgccaagaagaatctccttagtcctttgttatttatcttttactgaggtctcagtgttgtatttcctgctgggattaaaagagaatggctgagagaagtttctggaggctactcatctgaaaaatccagcgatttaactggcccatggggttcagaaacttggaatcaagttcaacaaaggcactaagtggccaagagcttatcccaaataaatcacagcccccaaacaaggtgttgaaaatctatggcttactctcagttctactgctgatttattcaatgacttattgcacttctctaccctccctcctcaatttcatctctaaagtcaaagtgatgacacctggtacctgtgaaaatgaatgatttcagtggtttcctgtgtgtaagaggctcttcgatccttgccttcaaggctggttgaaatgtggtaggttaagtggatgtgctaagactggctttccatgaggttttctcagcccagcctcagttaacacagaggcttaaaactataggcacaatttacccactttgtcagttcctcagtcaccaattagcaggactaagtcctgagccaaacgggcaagtattgaacacatagaacctcatgggttctcttgacctgtcctttttgtggtcttctctttctgtgcacaccttaaaacaaatggtttcagggagtggccactcccaggagaggacagagttagggtgaagaatggggcagtgagcatcatggggcaatggagcccttttgttcagaagttgccttgtctccctcaaccatcaccctcttcaaagaaccctcatcagaaaggccctcgtacctttctcatttccttcctgtaaagacaagggaattctagaggagaggagagcatcagtgtttactttacagaggagcaaacagagacccagggaggtcaatgactggtcaaggctctgacacctgaggcagaaccacatgggaggtaggcattccgcccccagcctagggccctccacatcccacgccgcttccttcagtgcagggtgatgctgccactgaccaggcttctgagtgtctctgctgtacactccagatgacaagcctgtcatcagcttcaagcagacctcttaatccactgctcagggttggcatggaagggactcttcaaagaaaccagcacattagtgacctgaaatgatctgtgtcccagggctgtcttaaattatttacccaaaagtaaccagtggtttggggcagacttctcactttcctggccatattgtgaagctcctttacaatgcgggaagtaaacagtgtcgaggccaatatactcatacaatatgctstgtgtagacacagagcgaaggctgagaattttctgtaagaaactgcagaaaagcaaactaatgaaggaatgctaatcccaaataatcttaacttagaagaaggaagaaaatgagggagagaggaaagataaaaaaaagtgtctgtgtgtgtgtgtgtgtgtgtgtgtgtgtgtgtgtcagagaaagagagagtgagaaagaatggaaagggccataagagagggccttcttatttgaggamtaaatcattctcagtaggaatttccaggcagcaggttggagtgtcttgggggtgtttcccctgagcagcatgtgtggtcttacactaccaggcagtgttccagggaaaagcttatttcattagaagaggttgggtttgtgactggatatggcgttcaccctttgtgccgtagtgttgcaatgtattgacaagcacactagagaatatttgactcttccagggtggagggtgtttctggaacagtcttgtgggtgttttcataactagccaccctggtctctcattccaaaaaatcaggacagcaggagatcagtgagaccttgaatcatgcctcaccgtgtacctactctgtctctcgatgatgcagagagaagggacactgaccaaaataaggtgactttttggcctgagactgatctycatatgaaaatgaccagagttttgtgaagttgggttgtatttgtttttaagcagtagctactgtgcccacttgattactcaagctctgtaaaaccccttcccatcattcattcagagctgacctctttctctcactgtgctgatctgcaacagctggggaagggatgggtgttggagatcgggarggcagaggtctgactctcacatagatatatgcaaggtggaagatttgtggcaaagctaggtgatcgctttgaattccttgatgagcctgatacgaatgaatgcaagccaaaagacaagagatcaggtgccatgtttgaaagcatttctatcaatcagacagataaagggaacagaaatcccccgatgcccaacttgcagcagcctcaattccacagtatcctcctctacactcccacattttccttcctgatagtggcccaggctcatttgcccaatccctgccctggactccagcagcacttgggagtcctctccgcaatgcctcactttstttcatgctaatttggcatgggtgagtcttcacttcccaaccaccctgaagggccttgatggtagacacctggtcccttacatctttattttccaaagtcatcagtttgtttcctgggcatgcagtgagccctcttactaagtggtgttaggctggttagttggttaatgaaaactgccctttgaagaacaatgtaatttagtttcctgctctgggtgatgcctgtcatggaaagcatgaaaccccaaatttcagatccccacttcttcatgttcatgagaagcccctcaaagccctactctatcaaagtagtgagccagtgaaacaggcaaccaaagtgtgtatccagccaatccggatctgagataaggcagactcttttattttattagaagggggcagtagggatatggtggtagttacagtgtcccagccacacccaaagaacttgaatgcagactggggatccaccctggccctaatacagttatttgagagtcagtatttgtagtcaggctgacctgagactgaatccacatgggggcctagaaggaaacagggtcatgggagcacaaaggttgaaagcggaactcgtgtgggtggtaagatcccttcctgacctgcattcttctagaggtttggmccattccactctccctagcccatctcacactcaccaacacacccacccactaaaacagagtcctggaacttcctcttcaagttttccccattgaaaacaaaattctgagtccctggttcctttctcccactctctcctgatgtctgccctgacttcggcagctaggtctgccatcctgtggctgccatttcccctttccagggagctgtggcctctaccctctgccttgggctcctagctcatcattctcccctctgcctcccagaggccggtagctttacccgttggttctcctggtagcatcttacctgccacascttgcctattctttgctagaactacagggacctratgagagaaccacattccttcctgctggcctcctaaggaaacaggctgcagtttacctaccaggctcaacagaaaaggaaagtggctggtaaagggcaaagatgcttttgagagagagaaagctcttaatcaaacacagatatcaagaatattagcaaggggactagagaaaattgctatcaaagtaaatggttttttgtacaaatgttccctttatttgtgttttccccagtgtgccattctttctttaaggcttggtgaacagatgtgcttttgaaaatgttgattaacttatcctttttttgacccccttcccactcactcaaactcaggggagcagtgattatataaaaagccaagtcaagccactaaagtgttcttcttcaccttaagtagcctttgattctccaggtgcagaaatctcagctgcatctgggcaattgatttcattgagtcttagaaatgggccaattcttaggaaatcatctcatccagtcctcaacctccagagacaagaggccgtgatctcctgtgataaaatgttctcaaaatcattagcatcattttaccctttttcctttaagatcaatgccacattcacccctttccagccagtgatctatggtatcctaagacttcttccctgagggtgtgagatggagcaagatggcattctagcctccaagaattcatcacatcctkggcagaaacaagatccctaaaagcaagcataggatttggcccagaagtcactggcaggagccccgtggttctcatcctaggctgattcacatattcttatccagtgttctgcctcttttactggtgaagatgttaagacatatgagcagcccatcaaaccaattaattgttggaaatgtgayggttttcttccatgttttttttttttttcatatggaaaaaaaccctgtgggttgactttcacaagctcgatttgatccctgtgacaaacaccaccttcctcttgttgattcatgttcacatctcccttccaaggaaacaacctgctctgttggggcctggaggagaatgcagggaatgggcgttgaggtggggaggctggcgtggcctgcaggtgccacttgctgtgctttaaacatgcaaggaatgggctggagttatggaggattagtgccatgtggcatcaatcttttaagtggggtcttggcaagttgttttgtgcatcccttactagsgaccgagggggatgagaatgtgctttagcactttggccagaaatgagraagacttctaacatgattgaaaccatggcctccaggaaaagactgaatttcaaatgtgacagtgatggatcaatgctcagttcrgatcatggtcaagtagatcttccccgagatgtagtgctgatgaaggaagctttcgggatggtctaaagttctttttctccctcttgtctgatacttcagccgtttgggattttgattttcttttaagccttgatttttggatttcaatttatagtagtgacttcaagattgtttatctgacttggtggaacaaaactctgagagggccatacacattcactggggctgtcttgagctgacagcttggaaaggcataattagcttgtgagataggaagaaatgataagatgttgctctttgccatgcatttgatgttctytattaatgttttaccattttagacagataactttcagtggttstgatttctataagttggacagcacagtgaatagagagacctgtattatcaccctcccaaattatcatgaaaaagaaaaagatagacagtgataatactggagaaaactcatagtaaattaacttagcctggctagtcagattggatgcccatctttgatctattctaaaccacgaagaaagctaataggaaaaatagacttgggaaggatgagaaatattagcacagatatgtgaaggtcaacaggcattatgacatgccttccatttctgctcttaaattaaaacatataatgatgaaacaagacttccttaaactaccatatgtttacatgaaatccagaggagaaagactctgatgcttttgtgcccactgagatgcgtgcctatgaagaggtgcagcatgatacactaaatggacatcccagtaaaggcagctgctgttgggcataagatgccattgaaggtgccttaaatgaawcctgtgttcctaatgaatgccagtcattaaaaaggcacagtggcaggggttgcttggcactgaagacccagagtttcttcttagttctgtgttactggttgtggttggaggaagacacaggtcatctgaaggagaacaatccagtaatgtccataatgaatgatctagaagtagaggtgattctctagctgcctgccagaatggggagtcattctcgtaaagattgcctccctgccttttagccatggtgayagwacttgttattaacttgtttttattttctttatattatagtggacatcccagaaatacatgagagagaaggatatgaagatgaaattgatggtgagtactgttatgatttagcaggtaatcgtaaaattcaagtttggttataaaggtgtcaacaaaaataatgctctgggtatcggagggcccaaatctagaactatcagtcagaaatatataaaagaatctggagaaaaatgagggaaccatcaatggatctgtcagggtcaactttagaggtttagaaagtttattgagttcctctgcctaatctgaaacagatcccctctttccagtaactttttacctggatggactttgaatctgaataaaccctttacaagtgaaagatcagctcctccatacgtgtcatagtctgaatcttttgaccttctcccaaaaatggcctgagtgaatgagcataatgtgaatattctcccagacctgctgtggtttctggttccctggcttgggggaaaccttcctcacactattcaagattccaatttggagcttcttgcaagatttcggtttctttttcacactgaccatctcgtatctttatatttattccaagttctatttttccactgcaaacacatatacttcaagaggctagagggctgctgagcaaatatgtagatgtaatttcttccctcaactcagaatagcacaggtctctctctgggcttctctgagtaccagagttgatctccaacagactcaacagcaagattccacttaaagaataactgtagactaagattgatgaatttaagaggaacagtttatagagcagctgcttttaacctgcctttaatcagaaacttcatgcgtagttatagaaactggagtgactaacccaaacagcaccttgttaactgactgcagactctccctgcaaaacccagtccaacactccttttatgggcaaaagtgcatgaccaacctacatggagagaccgcagtagatcaggcagaggcgcactggaatggagtagaaagggcaatgggtaaggaggcagaaagcctgatctccattcctgctttaactgcttgctaagcctgtgacctggagtgagttacctagttgcctaatttctttaaacctcagtttcctcacctattaaaatatatataatatcctgccttcttcatgggattattaggatatttcaaaaaatgatgcccagatgtgggcatgccttggccacagtgtagaaacgtaattagattagtctgctagggcttccagaacagagcaccactgactgggtggcttacaacagacatatattttctcacagttctggaggctagaaatgtaagatcaacatgtggacagggttggttccttctgagggctgtaagaaaggatctattctagctctgtctccttggcttggagatggccattctcctgttcatacgatgttctctcatgtgtgtgtctcagaatttcccctttttctaaggataccacttttatcggataaaggtccaccctcatgaccttattttaacttgataacatctgtaaaggccttatctccaaataaggtggtgagggttaggacttcaatatgaatttaagtgtctgggagggggatacagttcaaccagtaacaataaggcacgatgccttattattaaaggaggtctgatggctgggaaaaatctgctgcttatatggccaggaataccaaattaggaaactcatcatgtgcaaatagtcccagactgtcctttcattakcttgaggaggttggaaaggagggatgtagaggttgccttgaacacaaggccatcctaggtgctgtaaagccaccccaaaggtgctgttaaaatcagagcttacctaatgtaagtcaaattatttatttatttatttatttttttggagacggagtctcgctctgtcacccaggctggagtgcagtggcgcaatctcggctcactgcaagctctgcctcccaggttcacgccattctcctgcctcagcctcccaagtagctgggactacaggcgcccgccaccacgcccggctaattttttgtatttttagtagagacggggtttcaccgtgttagccaggatggtctcgatctcttgacctcgtgatctgcccgcctcggcctcccaaagtgctgggattacaggcgtgagccaccgcgcccggcctcaaattatttaaatatcggatacttagtacttactatgttgcagacaccaagcactttacaaatattagttcatgtaatcctcctaacaacccagttgaggcagattttactattatccccatttcaaagaggagaaaactgaagcaaagagaggttcaatagcttgcccaaagttacacagctaggatgcggccaggctgggctttgaacccaggcagtctaattccagagctgctgctgctaactactgtgctctgaagagcctctgggctggggaggctcagtcacttcaccctgacataggcagtgcctgcaatctctcatgaattttatgtatcrcagatgaatacgaggtggactggagcaattcttcttctgcaacctcagggtctggcgccccctcgaccgacaaagaaaagagctggctgtacaccctggatcccatcctcatcaccatcatcgccatgagctcactgggcgtcctcctgggggccacctgtgcaggcctcctgctctactgcacctgttcctactcgggcctgagytcccgaagctgcaccacactggagaactacaacttcgagctctaygatggccttaagcacaaggtcaagatgaaccaccaraagtgctgctccgaggcatgacrgattgcacctgaatcctatctgacgtttcattccagcaagaggggctggggaagattacatttttttttcctttggaaactgaatgccataatctcgatcaaaccratccagaataccgaaggtatggacaggacagaaaagcgagtcgcaggaggaagggagatgcagccgcacaggggatgattaccctcctaggaccgcggtggctaagtcattgcaggaacggggctgtgttctctgctgggacaaaacaggagctcatctctttggggtcacagttctattttgtttgtgagtttgwattattattattattattattattattattatattttatttctttggtctgtgagcaactcaaagaggcagaagaggagaatgacttttccagaatagaagtggagcagtgatcattattctccgctttctctttctaatcaacacttgaaaagcaaagtgtcttttcagcctttccatctttacaaataaaactcaaaaaagccgtccagcttatcccatcctctgattgtcttctgacttaagggatttactgtggtgtaggttctgccagccaaccctacaagctgccatttccagtcctagcatttaagtaggatgttgttgcctttaacttttcttatccaggggaaaattgccattttagggtcagcatgaacagctctttcttgtatgcgatttaaaacaaactggaaaggaaacttcacacgtcaaaatccatagaagcgcctggacgaggcttaaagtgctttgtgagtgaataggagccattcgctaattctagacccacagtgtctggtggtggggcttcccttgtggggcttctggtggtggttttgccttttcttttccctcctccatgttcttctaaaacatatacatatatacatacacacatacacatattcttcaggtctctaagcccctggaagcagcattgtgtgatattctcagaggcaggggaaaatagagggaaaaatagagactattggtatgttctccccatcagcgagttattgtaactggtcaccactggacgggaaggagaacagaggagagggaaagagaagcccaacctctgtgatcatatgagggccaaggctgagcagtgtagacagagaccctttgaaatgcatttgtctctcaaatagactagtaaacaccgacttctcctttgggttacaaacaccatttcaacctttcgggagagtcagagctaggatgtacaagaactgattctaaccagaagtccgcaagtactgtggacaagaatgcttaaccatgctgcttcagccttgagagacctaggttcttacacatatgcacacacgcatacacacatgcacgcacacacacatacacacatgcacgcacgcacgcatgcacaccaatttatgtttttattaagtgccttgaaaaaatgaagaaaaatgtattttccctttatgtaaaaattagtgaatatcttatgaattaaggcattcctctttccctaaccccgatggctccattcccaagtaccccaactcactgctgatcctattaaaggaatgagtcctgctacccgagtggtagtcatagccctagatgactctcaactactcttcaaagggaggcatcaggaatagaatgaaactgtgtgaaggataagattgttcgcatcaagatccaaatcttgatttcatattaacgcctaaggattgcctgtgtgctggaaatatatttgaaactcaaccagtatgcccagcctattgcatatcattgtcagaccatttttgctgctgtggtcacccacgatttcatttgtcttatacccaggtgaaaggggaagggtgaatgggactggctggttcctttaaatgttaacttatggaaatgctagttcaaatggtaatgtcacagtgttttgtatgcagagagcaagagttcaaccaacagctgtttattcatgtgtgtgtgtctttgctgctttgagttctctgtatctactgtgtatgtgaatggtcatgtgggactcagtggtggtgttgtgactttgacctagggtccgagtgtcacagctgatcttggcactcggcactcattggcacagtggtagttagaggtgaaaagtagagctgtcaagcccaagggcttagctttagggctcctcctgagttcggcccacagtagaagcaagattttaactagccccttttcctcttcaccctcccatgatgcgcagtgttcagaaagctggtaagtcctagggatttccagaagtagcctgcagaagaaggtaagtttgaaagccactccaggggtcctgatgctgtcatgctcagtgagccattttacagttctccaaagtctagccctgtttcggacctgcacttcacctctaagttatgtacaactcaacctgcatccctctaaaagtcctatatccatattcaccattggctaatttgaggccctgagtgggccttgaatgctaaaaagaagcagggtacgsagggctacatgtagataccacaccaaggctggaggctgstctgtcrtaagacagaaagaaagacgctgggcccaattttgacttggccaggggacaccttggtgtgtttgttatctttatctgtgggtaggctagctgacccatctccttgagtcattccctttgggaaaccccactgccagtattgatctcctttttgccttgtactgaatgacacattacctccacactctcccggactaggtggtcaacagggccacagggttgctttctgtctttggtggggcaggggagttgacagggatgagggtccaaggaataagcatgaatgacaagaaaacaagggaaagagttaacctgtcacatagcaggttaactttttcagggtttgcagttagaggtattcgaccattcactggctgagccagatcacgggaacttgagagcttttactgtgattcttcaatgtaaaaaataaacaacaatgtcaaactgtgtttatatgatttgtataaagcctttttaagattactatttaaataaacattataccagagatatttttctgcatcgtggtttttttttttttttttttctctgcattgtctttattggagacaaacagatccgggataagggtgaccaaattgtcccactttgcctgagactttttcaggtttttagcactgaatgtcctgttgaaataggatagttccctcaacccattcacaggactcatgatagggtggcttgcttactcagcctgcagctctcaaccccttgtgggagggggagaacacaggagagcaggcgcagaggccaggatgagcacttttgggcaaccggcaggagcagaaccctgtgcgggcctgcggcagagtctaggggtcgcccatgacccctggagccccagagggcctgtgttacagtgcgctcttctagctttgccatccacggatggcttaagtgttaaacagctcagtgtagrgtcatgatgacagcctcttgcacccacactcaggttcttgtctagcatccaggaggaatgaggtttcacaaatttgaggttggtgaatgtggaggattttatttagtggtggaagtggctctcaatggaatggggagctggaaaggggatggagtgggaaggtggtcttcccctggagtttgggcatccctggccaaactcttctccgaggtcccgctaccaagttgtccctctgaagtcaagctgcttctctccaacatctggctgctgcttctctccttctctgccactctgccactctgctgctctgctgctctgctggtggggcctggggttttctttgggtacaggatgggggacagggcaggmcagggtggttttagaaaaggtaacattcaggcaggaaaacaagaatgtatgttctcactttgggccgcagtaccaaagaagagggtggtacccttaccagataccaccctcttctacccagtatttccttgcctcctgtcmctatcactgtgtcctggaaaaccctttgtctgagtgagcttggtataacagactaccacagacttggtggcttaaacgacagacatacatttctgacagttctgatggctgggaagtccaagatcaaggcaccaacagattcagtrtctgacgagggctctcttcctagcttttagatggctgccttctctctgtgtgctcacctggcctttccatagagagagatctttctgtcttcttcttctaataagagcactaatcccatcatgagggtgggacataatgaccmacctcatgacctaatctaaacataattacctcccaaaggccccaaatcctaataccatcaaaatggtagttgaggctttgatgtatgaattttagaaggacacaaacattcagtccataatacccctcgatcctrggcaaactgagatggtaagtcatcctcttgggataatgtttcttctcagcatttgaagcagtaggctaatgggcaggttggcttcttataaaatgaagatagtgtgggaatgggtgatgggccatctggccagatgggctactttaactcagagtcctacctggtagacttcagaggctgtgacctgtacaaactcttcctccctggacatcaccaggccctgcaactttagattgtttgctccttcctttgtggtcaaacccttgattgtcaatatctctggtggtttcagcatctgtgatggtgcttctcaaagtgtggttcttggccagcagtgttagcatcattggggaacttgtcagaggagatgtatatgcttaggttccatcccagatctactgaatcagaagctctgggggtggggtctagggatttgtgcttcagcaaagcccaccaggggaatctgctgctctttcaaatttaagaaccactgatccagtagaaatgaaaatgtttgtatcctcctaaaattcctacatcaaagcttcaatccccatcacgatggtattagaccgtgcggtctttgggaggtgattaagtcatgagctgggtcattaggtcccaccctcatgatgggattagtgcctttagtggaagaactatcctggcctcaggtgactgaggtgattgaggaccttttcacctattggttattggattcaaaactacctaggtagtacaataagttccctggcaagggggagggagacacttcattatgaacctccctccccatggaagctctgaacctgagccaaatttgccrccatcctggggctctgtttaccctgaaaaggaaatttgtttcggtctcttatttaagaaatgtttttgagcagttcctgattttgtaagctcttagagcttccactcagggaggggacgggaagcaaacagccaaatgcaagaacatgatcaacaaaggagaagggctggagatggggctgggaaggtaaagggccaggacacactgcaccttaaggccccagtgaggaagtgctctctcttctgtatcattcttctgctctttttaattgataaaaaagggcagcccccactaccacccattcctcactgaccaataatgtcaccatagtcaaatctctgcaatttccctctttgaccctcctgtgatcttacgatatcttgtgtatcctgggatgcctgcttctattgtattactgaccctagcaacaataacagaggttaaaatgaaaacaaatttcttctctcctttagttgagcttttgggtatttttaaagccctaataaactaataatatctcctggtccctagccagcaagtgtttacataagacctttttttttttttttctaatctacatccttctggaaatgtttacatgaaactcaggggaggcaggctggccagtgaaaygaggttggaacagraccatggttgaagaaaacaggacccatctggatgcagaggccgcctttgcccctgtgacgttggtggtgttgatgggggtgtgggagggaacctgaagaggttgaaagatgactcaatttcagttctcacagccttcaggctctaatcccaggctgagctaaacaaaactcttgggaaaaagatctctccaccgggggataaagggtgtgagatggggagtggggtggtgggagggggtgatggtcagaacagcaaatgcaaccagtggtgggggctgagagctacctcaccatccaccctaggggctcacagtaacttaacagtcattcccatcaacacaatgggaagagtcctggaagcttacaggtcrycccaggctgaggcaaaggcagggcttgcccctgaattcctatctctcagaactcttgagccaccttcgcctgctgcccaccccatcttccaaggctggtcctcttccttcctgagttttctcagtgaccctcagaggcagttcctggtggaaagacaatgcctctcatgttctctctggaggcccaagcaagagacctccaagggaactaagaaccagattacttctgcagctcatccagagaataacacctgtttcctcacccttccttgtcagaaaaccctataggacaagtgtgtgtgcgtttgtgtgtgtgtgtgtgtgtgtgtgtgtgtgtgtgtgtgtgagtgctgttcctgtcatcacagttttacaagtgctgtaagaaaaggaggccttctcactaagaaaacatatcccacctggccacagtgagtctgagccctccctcaacccctctcctacacagtggcaccagtgcaggagggtgccctctctgcagaggacacagcccagcccaagcagggcccacacagtgttcaaaccctgacctgaggccctgtcaggctcacgtgcacactgaggtgcctaggcctctgcagaacgcccttcaccagtggagaggcaaagccctggggtctgggcattcaacatgtgaggatttggggtgcttggttctaggtcccttagcaaacccctcactagaccagcaggccctggcagctgtgttcaggcatggacccttctttacccttgagactctaacagcctccccagaaacagtgccgttcagtctgcaaggtgcaggctgcagcctccacagcccctcaggcttctcagaactgtctgcagggccaggatgccgtggtttggagcatagccccactaattaatctcatcctgaagcccttgactgcctccactgggaattgaagcacagccttgctgcacctccgccttgccaagcctcaggcagaactgcccgacagggccttgactccagagagggtggcaggcggcctttctagatttgccttctgtcttcaccttttttcctcctctcacccctcatctcatctcgccttgaacattcgtgtttctattcccagctgactatttttaatgcctgtgggagttcgaagaaagctttgtagggttttgaaatcccccagtgctcctttccccttgaatgtggacatgacgaggaggcggagagcactgtctcagggcttgggagaccagggttcaagattcggttctgcctctgcctgygtgacmttgggaaggccacaacacatcttgrctttcccatctgtaaagtggatgtttgggctacatggattttgagccctcagctatgctatgacatcctagtccatggggtggttctggctggttgtctgtatgtgtgttgcacagcccagcaaggcaaagctctccggatgctcccttcccaacattgtctcaggckcccttctgcacagacggtggggatggcatctttgggcttgacttgatgttatcgtggagctggaccccaatcccagctccccagaggcagaactgctcttttccccagagcccttcattcctgtctactgacatagaaactgacatgcatattcatcccccatgacctcttgagggaagaactgatgtatccattcatttatataataagcctattttakattaaatgcctaaactgtgcctcgctaggtgctaggagacatgatcagcaaaacaacctggttctgtcttcggggacttacagtctggaaacacacaagtgaatcaggaaaccacacaaatataacgatatggcaagagctccaaagcaaagtgcagagagctgcgcgtgtgtaagcagggacctgagcattgtgtcttatgggagctgaaatcctaggatgagtcaggtgagcagggggagaaggcaaagatgctgaagccaaaggaaacttggctagagcgaagtagggggtgaggaggaatgtctcattcacctttgcatcaggatccccggctcacacctggcacctactgcctgtgcataataagtatttgttgaatgaatgaatgaatgacttgtataaattcccctctgacaggcatcaagctgcccagtttgtacagactaaaagataagtgtttttgttcttgcttcttgctacctgttcttcactgtagtagaaaatgtgcaagtaaccttccaggagtctgtatggagagattatgccataagtttcagcatggaaatgggcactattagtytctgcttaaatatgataatttaggctaaatataatattcagattaaaattctgttgaaacagttggaaagttgccagatttagcacataaaaatgtcccacgcagccacagtayagcagttcctcaaaatgttaaacatagaattaccatatgatccaacaattccacttctaggtatatacaccaaaaataattgaaagcagggactgaaacagatatctgtgcactgatattcatagacacattattcacaayagccaaaaggttgaaacagcacaaatacctatcaacagatgaatgaacaaaatatggtgtgcacatacaatgaaatattattcatcctgaaaatgaatgacattctgatacatgttaccacagagatggacttcgaaaatatcatgctaagtgkaataaaccgacacaaaaggacaaatatgatatgattacacttatagaaagtacctagaataggaaaatttctagagacaaagagtagattagaagttaccatgggctggg

SEQ ID NO: 9842 - DNA, 22808 bp, Homo sapiens
acattctataattcagtcggggtttactggggatggcttgtctctacttcatgtggctccacctggggaggttcaactggagctgggggatcaactctcaaaatggtcctcctatggctggcaagttgatgctgactgtttgctgggaggtctgctggaactcttagctagtgggccttggttatcctgcgtgtgacctctccacaagacttctcacagcatgatggtctcagagtaatcaaacttcttacatggtggcttaaggtctctaagaatacaaaagcagtagaagttactatacctttttaaggcttaggtctggaatgggcacarggttacttctgtcccattctattggctaaaagagtcacaagccagaaatgttcamggggmggcaactacaaaacagtgtgaatacccagaggtatacctcactgggagacattgacttccacaaaccacaactacccacaactacatggataaatattaggttaggttatgcttcagtatcaaataacctctacatttcagtgacttcacacacaaatggttacttttttcttatatacctatcccatagaagttggtggggcactctgctccacgcattcactcagggatccaggctgatggaggctccaccatgttggagtggcaccattgcaccacctgggacatgagacctcacctttgccacaactgtgaaggacagaaaggctcgagaatttcacctggcctcagctctaaagagacaaatgtcacttatgctcacatttcatcagctaggactagtcgcatgatcccatctacactgtaagtggggctggaaaatgttggagaacacctggaaaaatggctgagcattactgtcttggccacatgtgatagaactatttaaaacaaaaaaagttttacataagatgcaaggtagtgttcactttggggtaggggtggaacacacaagaaagtgtcagtgatttgtaatattctagtttttggtttgagcagtgagtgttaattattttttaaaacaaatgaatgaatgaatggacaaatgaataaataaaagagagggctcgaggcagcagcactgaagcctaacctcacagtacaggccaaaaatgacccttcaataaacattcactgagttcccagctgaagctggtaggcctctccaaggtacaaagatgaataaaatatgggctcagcccctctaagtgcccagctcagaggattcagtagacacataaaccaagcaggagggcaaagtacagtggagagtcttgctcagtgggagctctgggagtagagggagccccgagtaggcctcaccccaagtcacatgtgttgggttatgaagaatcaataggaattcaaaggtgaagaatggagtggaggtggggcaagttggtcagggacactcattttaccaagagaggaagatttgtgcaaaggcacaaagaggccttcacccctcaggtggcctgtgttcacagcatttcctcactgccttctagtccctaaatgatctgatcaacttactccctctgtactgtaccacccagaagcttctgcaagagccaggcacttgtcctccacaatggctgccatgagtgttggttgccgatggttacagccaagtcgttccttggccttagaggmggaagctctcttgcccgagggcatgcactcccctactgcaggggcagccacgtttagatgactgtttggaaacccagggtgtaagggcctagctctcatgcttcaattcagcgaactctgcaggaccatcccagctccagggctcctggtgggatcagccaagkcctctgtgggcctccagcctccatyagttcccggttcttctctctgcccaattccrtttcttttatatccagacaagtgttgattgtgaatgcactccccaataaactyccttcaagcaaaactctatgtcagaatgtgwtttctgggaaacctacctaagatacccactaaaatatagataattactaaattccaagggatgcctttcctggggatgtttgtacagcaattatcmtcataactaatattcatggagtgatttctatgtgccaagctaagcactttgcttttaagatcatatttaatgaagaacagagcctcacagtaagaatacatgtcttttcttttawttatttatttatttattttgagacagagttttgctcttgttgcccaggctggagtgcaatggcgcaatctcagcttactgcaacctccgcctcccgagttcaagtgattctcctgcctcagcctcccaagtagctgggattacaggcatgcaccaccatgtccagctaattttgtatttttagttrtagatttctttgctccttctccactcccactgcttcatttaactagccttaaaaaaattattaaaaataaaaataaataggcctggccaggcgtggtggttcgtgcctgtaatcccagcacttgggaggctgaggcaggcggatcacctgagttctggactttgagaccagcctggccaacatggtgaaacccgtctgtactaaaaactattaaaaaattagccaggcatagtggcaggagcctgtaatcccagctacttgggaggctggggcaggagaattgcttgaacctgggaggtggaggttgcagtgaactgatawcgcaccattgcattccggcctgggcgacagagtgaaactccatctygaaatwaataaataaataaataaataaataaataggcctggcatggtggctcacacctgtaatctcagcactttgggaggctgaggcagccagataatttraggtcaggagttcaagaccagcttggctaacatgatgaaacatgacgaaacccccgtctctgctaaaaattcaaaaattagccagtcatggtkgtacatgcctgtaatcccagctactcgggaggctgaggcaggaaaatcgcttgaacctagaaagtggaggttgcagtgagctgagatcacgccactgcactccagcttgggcaacagagcaagattccatctcaaaaaatatataaaaaataaaaataggctgggcgcagtggctcacgcctgtaatctcagcactttgggagaccgaggcagacagatcaactgaggtcgaggtttgagaccagcctgaccaacatagagaaaccctctctctactaaaatacaaacattgggtggggcgagtcatcgtctgamgtctggccgtgagatgtttcgggagccggggtctctccgctgcagacatgacgaagggccttgttttaggaatctattccaaagaaaaagaagatgatgtgccacagttcacaagtgcaggagagaatcttgataaattgatagctggaaagctgagagagactttgaacatatctggaccacctctgaaggcaggcaagactcgaamcttttatggtctgcatcaggacttccccagygtggtsctagttggcctcggcaaaaaggcagccagaatcgacgaacaggaaaactggcaggaaggcaaagaaaacatcagagctgctgttgcagcaggatgcaggcagattcaagacctggagctctcttccgtggaggtggawccctgtagagaygctcaggctgctgaggagggcgcggtgcttggtctctatgaatacgatgacctaaagcaaaaaaagaagatggctatgtcggygaagctctatggaactggggatcaggaggcctggcagaaaggagtcctgtttgcttctgggcagaacttggcatgatggagacgccagccagcgagatgatgcmaaccagatttgccgaaattattgagaagaatctcaaaagygctagtagtaaaccgagkttcrtatcagacccaggtcttggattgaggaacaggcaatgggatcattcctcagtgtggccaaaggatctgaygagccctcagtcttcttggaaattcactacataggcagccccaatgcagacaaaccaccccttgtttgttgggaaaggaattacctttgacagtggtggtatctccatcaaggcttctgcaaatatggacctcatgagggcygacatgggaggagctacaactatatgctcagccattgtgtctgctgcaaatctcagtttgcccattaatattataggtctggcccctctgtgaaaacatgcccagcggcaaggccaacaagctgggggatgttgttagagccaggaacrggaagaccatccaggttggtaacactgatgctgaggggaggctcatactggctgatgcgctctgttacgtgcacacatttaacccgaaggtcatcctcaatgccaccaccttaacaggtgtcatagatgtagctttggggtcaggtgccactggggtctttaccaattcatcctggctctggaacaagctcttcgaggccagcattgaaacaggggaccgtgtctggaggatgcctctcttcaaacattgtacaagacaggttgtagattgccagctggctgatrttaacaacattggaaaatatagatctgcgggagcatgtacatctgcggcattcctgaaagaattcgtgactcatcctaagtgggcacatttagacatagcaggtgtgatgaccaacaaagatgaggttccctatytatggaaaggcatgaccgggaggcccamaaggactctcatagagttcttacttcgtttcagtcaagacaatgcttagttcagatacwcaaaaatgtcttcactctatcttaaattggacagttgaagttaaaaggtttttgaatgaatggatgaaaatattttaaaggaggcaatttatatttaaaaatgtagaacacaatgaaatttttatgccttgatttttttttcattttacacaaagatttatatattttttttttgagacrgagtctcactctgtcacccaggctggagtgcaggtggcatgatctcagctcactgcaacctccgcctcctaggttcaagcgattctcccacctcagccacctgaatacctgggactacaggygcccaccaccatgcccggctgatttttgtatttttaatggagacggggtttcaccatattggccaggctggtctcaaaactcctgaccctgtgatctgcccgcctyggcctcccaaagtgctgggattacaggcgtaagccaccacgcccggccagtatatatttttaattgagaagcaaaattgtacttcagatttgtgatgctaggaacatgagcaaactgaaaattactaaccacttgtcagaaacaataaatccaactttttgtgcaaaaaaaaaaatacaaatattagctgggcatggtggtgcatgcctgtaatcccagctactcgggaggctgaggcagaattgcttgaacctgggaggcggagactgcagtgagctgagattgtgcyactgctgactttgtctcaaaaaacaaaacaaaacaaaaaaacaaaatgaaaacaaaaagccagggctgcctctgctcaataatgttctatctttgttccgcctcttctctggggtctcacttcttgggagcctgtgtgaaggtgaattcctctgaaagctgactgcccctatttgggactccccagtctctttctgagaaatggtgacattgttcccagcacttcctctcccttcctaggcagcttctgcagccaccactgagccttcctcacatcctccttcttcaggcttgggctttccacctttcaccattcccctaccccatgctgctccaccgcactctggggagggggctggactgggcactcttgtcccccaggctgagcctccctccatccctatgctgcctgcttcccaggaacatgcttgggcagcaggctgtggctctgattggctttctggccrtcaggaacatgtcccaacatgttgagctctggcatagaagaggctggtggctattttgtccttgggctgcctgttttcaggtgaggaaggggatggtaggagacaggagacctctaaagaccccaggtaaaccttagcctgttactctgaacagggtatgtgatmtgccagcagatccttgcgacagggctgggatctgatgcatgtgtgcttgtgtgagtgtgtgctgggagtcagattctgtgtgtgacttttaacagcckgctcccttgccttyttcagggcagargtcctcccttagagtgtgtctgggtacacattcaagtgcatggttgcaaacttttttttttwaagcmctgaatagtactagacacttagtaggtacttaagaaatattgaatgtcrtggtggtggtgagctagaagttataaaaaaaattctttcccaaaaacaacaacaaaaagaattatttcattgtgaagctcagtaccacaaaaatttaaataattcattacaagcctttattaaaaaaaattttctccccaaagtaaacagacagacaatgtctagtctatttgaaatgcctgaaagcagaggggcttcaaggcagtgggagaaggtgcctgtcctctgctggacatttgacaaccagccctttggatggtttgkatgtataggagcgaaggtgcagacagcagtggggcttagagtggggtcctgaggctgtgcygtggccyttctggggtttagccacaatcctggcctgactccagggcgaggcaggccaagggggtctgctrctgtgtcctcccwcccctacctgggctcccatccccacagcagaggagaaagaagcctgtcctccccgaggtcagctgcgttagaggaagaagactgggcatgtctgggcagagatttccagactctgagcagcctgagatgtcagtaattgtagctgctccaagcctgggttctgtttttyagtgggatttctgttcagatgaacaatccatcctctgcaattttttaaaagcaaaactgcaaatgtttcaggcacagaaaggaggcaaaggtgaagtccaggggaggtcaggggtgtgaggtagatgggagcggatagacacatcactcatttctgtgtctgtcagaagaaccagtagacacttccagaattgtcctttatttatgtcatctccataaaccatctgcaaatgagggttatttggcatttttgtcattttggarccacagaaataaaggatgacaagcagagagccccgggcaggaggcaaaagtcctgtgttccaactatagtcatttctttgctgcatgatctgagttaggtcaccagacttctctgagccccmgtttccccagcagtgtatacgggctatgtggggagtattcaggagacagacaactcactcgtcaaatcctccccttcctggccaacaaagctgctgcaaccrcagggrtttcttctgttcaggtgagtgtagggtgtagggagattggttcaatgtccaattcttctgtttccctggagatcaggttgcccttttttggtagtctctccaattccctccttcccggaagcatgtgacaatcaacaactttgtatacttaagttcagtggacctcaatttcctcatctgtgaaataaacgggactgaaaaatcattctggcctcaagatgctttgttggggtgtctaggtgctccaggtgcttctgggagaggtgacctastgagggatcagtgggaatasaggtgatattgtggggcttttctggaaattgcagagaggtgcatcgtttttataatttatgaatttttatgtattaatgtcatcctcctgatcttttcagctgcattgggtaaatccttgcctgccagagtgggtcagcggtgagccagaaagggggctcattctaacagtgctgtgtcctcctggagagtgccaactcattctccaagtaaaaaaagccagatttgtggctcacttcgtggggaaatgtgtccagcgcaccaacgcaggcgagggactgggggaggagggaagtgccctcctgcagcacgcgaggttccgggaccggctggcctgctggaactcggccaggctcagctggctcsgcgctgggcagccaggagcctgggccccggggagggcggtccygggcggcgcggtgggccgagcgcgggtcccgcctccttgaggcgggcccgggcggggcggttgtatatcagggccgcgctgagctgcgccagctgaggtgtgagcagctgycgaagtcagttccttgtggagccggagctgggcgcggattcgccgaggcaccgaggcactcagaggaggtgagagagcggcggcagacaacaggggaccccgggccggcggcccagagccgagccaagcgtgcccgcgtgtgtccctgcgtgtccgcgaggatgcgtgttcgcgggtgtgtgctgcgttcacaggtgtttctgcggcaggtgaatgacgggcgtgggtcggtgcgcgctcggcttgcgcacacggtgtctctaagtgcgcgggtgacgagrgtcgggatgtgccggagaycccggggcggagagcgggattacaagtacaggaatccctggycacgctccccgcccctggaaacccagctggggcgagggagggcgtggacgggaccgttctgggagctcgcctttggctgcggttggctccaggccccaggmgcagtttgctcgcggcgtgkggatgaagtccgtgtccctggaggggcccaggaagggcgaggaaagcggagtggagtaakttcgtctaggatcggtcccgggtggctctgggatccaatctgckccgccctggcccaggtcccaggttcaggtcctttacgccactgtgtccaccacctggctgagcgctgaggtcagcgcgggctgtttyctggcccttgggaatgtgccaggacccgtcccctaaggactagcgaggaggtgactcactgtgacaaggagaccccagggaacggactgtatgaggtcagaaccccgcccgggatggggtacagcggractccagaagccctctcccctgccccttcgcggtctccrtcctcccatcggcacagtgacctatttggctggaacagtttgttcccaaggaagccgggcactggaggtycgggacaccgcgtcgggtccccgctccgcggcgcgctgtaggggtcggggagtcacggmcctgckctgggcgggctctaaccagcctgtcartcggggaagggcaagggtctcctctacctctttcycaccgcggccgggagaatcgcggcccagcctgtcctcgggtcggggcgctggactccggggcgggagcggagcccacgcctggatgggaggcggggaggkttcatgtctttgaggggtggggggtctggggggcacgacgctgctcagggcctcyatcagctgcctcgggggctcagggcttcccgacctagcccagattccctctccgaaagctacagggctgagcggagcaggggggcgagtcgccccctggggcgccgccgcctggcgcggaccacagcgcgtcctctccgtcccaaacccctgggggacacttgcgccctcttcgtgaggaaaagcatcttggagctgggttaggaacttggggcgcccaggcagcttcccctctccttgcctccctccacgtcgcgtttctgggaggacttgcgagcggttttgttttcgttgctcccgtctatttttattttccagggatctgactcatcccgtgctttgggcgtggagataaggtggaggggccggctcccggcgcgcgcgcgcgtgcgtgtctgcgcgggcgtgtgtgtgtgtgtgtgtgtgtgtgtgtgtgtgtgtgtctgtgtcagagacggcacaagagcgcgcggtttcccaacagcggcgggagtttcggaagcctggccggctcagcgtgacgtgttcgcggccccccggtcccctcccattctccccctccccaccccagggtgacgcgcagccggagtggaagcagttttggcgggcgagcagcgccttgcaggaaactgactcatcactactccctccagcggtccgaggctctgcccacgcacctcccacyccgcgcgtgatttcctggaggccggcgccccctcccggccctggcgggaatagcacacaggctttcccgcggagtggggctggccggcgcgaaccgccgyggctactcctgggctcatccgagatcaacccctatgccattaccaccccttcaaaggagcactccttaggttcaacagtattcactgagctcttactggaaattaaaatatggctgaagtctaaggcaggaaggccaataaaggaggctatttttaattgtttctaaaacaagggtttgcgtttctgagttttctttgggctgaaagttattatgagcatgagagcagattttgatgggggaggagaggcctatgagagccataagagaaggaggggtggtagaagaggagagggtgcctgcctagatcctagtcctgtcttgaactcccgagagccagggaatatccagcwccttgatgaagccmtaggcgggcgcctcctccttgtgcstatgatgtattgagacccagaatgtccatttcaaacataccagtgtgtctccgcttggctggcamcccaagagtgcccatctgaggaattgtgccaaacacttgcttgaatcttcaatytggattaagttggtctcgggaggcagggcctcagcaatctatattttgaaaaaactccctaggtgcttttctttctytytttctttctttctttctttctttctttctttctttctttctttctttctttctttttctttctttctttctttttctttcttttctttctttctttctttctttctttctttctttctttctttcttcctttctctttctctctttctttctctttctctctttctttcttttctttcgacagagttgcactctgtcacccaggctggagtgcaatggcaccatcctggactcaagtagtcctcctgtttcagcctcccaagtaaccgggaccacaggcgtgatcccccsgcccccatgcccagatttttttttttttttttttttttttgagatgcggtctcgctctgtcacccaggctggagtgcagtggcgtgatctcggctcactgcaagctccgcctcccgggttcacgccattctcctgcctcagcctcccgagtagctgggactacaggtgctgccatcatgcccggctaatttttttttgtatttttagtagagacggggtttcaccgtgttagccaggatggtctcaatctcctgacctcgtgctccgccctcctcggcctcccaaagtgctgggattacaggtgtgagacactgcacccaaccacccagctaatttttatttatttttatttttagtagagacagggtctcagctagttgcccaggctagtcttggacccttgggctcaaatgattctcccacctctgcctcccagagtattaggattacaggcataagccactgcccctggcctccccaagtgattgtgatgggcctctctggttaagaaacctcaaaattagagagggagtggggttcaatactacagcacaggactcagggcaaacaggcctgggttcagatcctggctgtgccacttatgaactgtgtgatgttaggcaagttacttaacttatctgagccttggttgcctcttctgtaaaaagggagctaatakatatccactttttaggaggattgatatttttaaactgcttagaacagcccccaaacataaaaatatataaataaatcccaactcatgcctagcagagggtggatagaggttatttgagggctctgtccactgtactgggtgacccctttatggggcagtggcctttggcctttttagctgtatgactcaggggcaagtctcatatctcttccatctcctgccctttaaacttggtgtgaarttaccaagagcctcctctcccaaccagctgggacgtgaaactgtgggctccactgatcacaagcagtggggtgaggtggggtggagcaratgtggcatgtgtcccgggcttcctgcctcatgaggactcagcagagctttcacccccagaaactgcaagttgggacttgtccctaggaaaatccagttgctgccaaggtcgtgcagtcactcagccctggagtcaagccagagcaggcaggtaggtgccagggctccctcatgggcaaactcactctcyrttttccctctcctgaagsgggaggagaggakccaggtagaccagccacctttaattttctttttgcctgcaaaacggtttccttggacacaggcaacacgaggcaggggctgccaggtgtctagacttcagatcacctgatgtgcctggcaggatgtggctcagcctgggagaaatcatcccttgcrctgccccgcccggcccctccttacccctaggccacccgcctgacgacatccttgggaaaggccctcagcctacagcacctgtcagctgctgtctgaaggaggtagttggcagggggaagtgataggggggaggctcagtaaaactgaaggcagagaggaataatcatacttctgttttcaatgcacttctctatacgaagtgctgctggcacgttacctacattaactcagttaattctcwtgtctatcctctgagacagtcactattactatccccattttatagatgaggaaactagagctcagacaagttaagttgcttgcccagggtcacctagtaaaacctggactccagcccaggtgatctggctccagagccctcctgcttaaccaccaggatacagcctttcattcagctctgttctgtctgccttgctgcatggactctgtgatcaatttcttgagtatgtgtctgtagccatgctctttaaacttgtacatggccccatttatggatgaggaaactgagacctagagacattaagtggcyttttaaagcttacgtagtaactggcagagctaggaccacaacccgggtgctttttgccccaaagtcccgggtacttttacttggcagagcagkgttaccctacttggggatctgggtygggggactyaggaggctggaggaactgtcagactgtttcttcttttgggaattgaccttctggccagggctgcgattaggaaactgctggactctggcaattcacacatatttggggggcattcacacccatgagggacacctctggggggaaaacaaattgattttagctgataatacctggtggcaaacaggaccctggtccttgctcttgcaatagacttgcctttgttgacattagcttgcccttcagttgcctgctctcccagtgaccttggtgtgccaggctggctgagctctgctggtgggggtcaggcctcctgtgggaaggaagcaggaagaccagctggaaggagtgagagagaccctctggtaggaagaygtcacctgaggtgacacagcaaagcccggccaggtaacatagtgtctaatctccgccgtgaccagggccttccttgtatctctgctgcaggcgccatgtcagaacyrgctggggatgtccgtcagaacccatgcggcagcaaggcctgccgccgcctcttcggcccagtggacagcgagcagctgagmcgcgactgtgatgcgctaatggcgggctgcatccaggaggcccgtgagcratggaacttcgactttgtcaccgagacaccactggagggtgacttmgcctgggagcgtgtgcggggccttggcctgcccaagctctaccttcccacggggccccggcraggccgggatgagttgggaggaggcaggcggcctggcacctcacctgctctgctgcaggggacagcagaggaagaccatgtggacctgtcactgtcttgtacccttgtgcctcgctcaggggagcaggctgaagggtccccaggtggacctggagactctcagggtcgaaaacggcggcagaccagcatgacaggtgcggacatgtgcasggaaggactttgtaagggaccaggattctcagaatccatggtccaagggctgacctgtctggtcctggtccagcatgctccaggtagaaggaaacaggcccagagaggggaagcaacctccctgaggtcacacagcaagtaggcagcaaagaccaactagctaacatttattgggaatgttcattatgccaggccctttgccaagcttctaaggtagatttatttagtccttatagcaatgttataacataagacattcttgtcaycctgcccgcctttctttttgagacaggtgtcttaactctgttggccagactggagtgcagtgatacgatcatggctcactgcagcttcaaactcctgggctcaagcgatcttcctacctcagcctcctgggtagctgggaagctgggactatagttgtacaccactacgccyrgttaattttttgagtttttgtagagacaaggtctcaccatgttgcccgggctggtcttgaactcctgagctcaagcagtcctcctgcctcagcctcccaaagtgttgtgattacaggcgtgagccaccatgcccagccccttgccatccttttagggcaaggaaaccaggctcagagaggtagagtgatttatctaaggtctcaaagtgaatttgccgttgggtcaagactaattataataacaacaactactgacgtttatatgggcccggcattgtgctgaacactttcatggattttgtaacagaatccctagatcagcactgtccagtaactctgcagggatgggagtgtccggtacaggggccacgagccacatacggctgttgtgcatttgacacacagctcatgtgactgaggaactgaattgttcattttatttgattgtagtctgtttaaacaagcacacagagctagtagtggttcctctgctgggcagcttgacttagagcagacccatgggtgcgggtgcggtgatggataaaatcacatctgtgaagcatggtgggacactccataatacccctcaagagacagagtggacgttccccgagttcttcctgttctcagcagtcggccccattggccccagggaagggtgtcctggccccccactgtcttcctcagttgggcagctcygccgcgtcctcttcttcttggcctggctgacttctgctgtctctcctcagrtttctaccactccaaacgccggctgatcttctccaagaggaagccctaatccgcccacaggaagcctgyagtcctggaagcrcgagsgcctcaaaggccygctctacatcttctgccttagtctcagtttgtgtgtcttaattattatttgtgttttaatttaaacacctcctcatgtacataccctggccgccccctgccccccagcctctggcattagaattatttaaacaaaaactaggcggttgaatgagaggttcctaagagtgctgggcatttttattttatgaaatactatttaaagcctcctcatcccgtgttctccttttcctctctcccggaggttgggtgggccggcttcatgccagctacttcctcctccccacttgtccgctgggtggtaccctctggaggggtgtggctccttcccatcrctgtcacaggcggttatgaaattcaccccctttcctggacactcagacctgaattctttttcatttgagaagtaaacagatggcactttgaaggggcctcaccgagtgggggcatcatcaaaaactttggagtcccctcacctcctctaaggttgggcagggtgaccctgaagtgagcacagcctagggctgagctggggacctggtaccctcctggctcttgatacccccctctgtcttgtgaaggcagggggaaggtggggtcctggagcagaccaccccgcctgccctcatggcccctctgacctgcactggggagcccgtctcagtgttgagccttttccctctttggctcccctgtaccttttgaggagccccagctacccttyttctccagctgggctctgcaattcccctctgctgctgtccctcccccttgtcctttcccttcagtaccctctcagctccaggtggctctgaggtgcctgtcccacccccmcccccagctcaatggactggaaggggaagggacacacaagaagaagggcaccctagttctacctcaggcagctcaagcagcgaccgccccctcctctagctgtgggggtgagggtcccatgtggtggcacaggccccyttgagtggggttatctctgtgttaggggtatatgatgggggagtagatctttctaggagggagacactggcccctcaaatcgtccagcgaccttcctcatccaccccatccctccccagttcattgcactttgattagcagcrgaacaaggagtcagacattttaagatggtggcagtagaggctatggacagggcatgccacgtgggctcatatggggctgggagtagttgtytttcctggcactaacgttgagcccctggaggcactgaaktgcttagtgtacttggagtattggggtctgaccccaaacaccttccagctcctgtaacatactggcctggactgttttctctcggctccccatgtgtcctggttcccgtttctccacctagactgtaaacctctcgagggcagggaccacaccctgtactgttctgtgtctttcacagctcctcccmcaatgctgaatatacagcaggtgctcaataaatgattcttagtgactttacttgtaatattactattgtggttattataccttataagaacaaataaatgggcttttgggaaggatttcataattaaataattttaaaaattaagcatttaaatttagagaatgcagaaaacttagcaaacagaaagactgctgcaaaaaacaacagcaaaacaaaaactactgtcacacctctgcaaagatcaccaatgtcaatattttggtttgttgtgtaatctttttgtaaagaatatattatagcttaacatcattattcatcagataaatgcaaattaagataccacaataagataccaccatacacttaccagaatgattaaaaaagaytgacagtgccaagcattggcaaggttatggagcaactggatctcttatttaaaaaaactgtttgggccgggcgcagtggctcacacctagaatcccagtgcttcgggaggctgaggcaggagatcacttgaggccaagggttcaagaccagcctggccaacatggtgaaatctctactaaaaatacaaaaattagctgggcatggtggtgcacgcttgtaatcccagctacttggaaggctgaggtgggaggatcacttgaacccaggaggcagaggttgcagtcagctgagatcataccactgtactccagcctcttccagggtgacagtgagattcatctcaaataaatacataaataaaaaactgtttggtaatatcttctaaagatgcctaccttcatggctacctcatgacccagtaattctattcctggacatgttctcgagagaaatgagttcatatttccactgaaaaaggcataagaatgttctacacagtggctcacacctataatcccagcactttgggaggctaaggcaggaggacggcttgagcccaagagtgtgagaccagtttgggcaacatagcgagactcttatctctacaaaaaaaaaaaaaaaaaaaatarccaggcgtggtggagcgtgcctgtagtcccagctacctgggaggctgaggtgggaggatcacttgaggagcttgggaagtcgaggctgcagtgagccctgactgcaccactgcactccagcctgggcaacagagtgagaccttgtctgtctccctcaaaaagaaaaaaaccaaaagaatgyttccagcagcattattattaacagacccaagctagaaataactgaaatgtccataacagaatagatatgcaaattgtggtatatttatatagtggaaagttatccaacattacaaaaaacaaggtrctgttgcatgcatcttctggttgtctattcataattaaccaccccaagactgagtggcttaaaacaataatcatttatttgctcccaacactgcaatttggcccagaactacttttcaaatgtggaataattctctactgcacagggcagagctttctactagaatcatagagttctgaaacgagactctccccgccagaggggacttccagggacttcacaactgtctacttatccacagataaaagtccaggaccagggaatacactggggcgtgtgacccaagtgcttgtcccatagcctgcacctgtttcagagccctctcttgctccggccgctgcttaaacatggcagcttactaaatcatccaataaatgggctggagtgatctttagtacactgcctctgaaacccaaattaaaaagtggtaagaggggggtgggggcctgggggagggatagcattaggagaaatacctaatgtaaatgatgagttgatgggtgcagcaaaccaacatggcacatgtatacctatgtatcaaacctgcacattgtgctcatgtaccctagaacttaaagtataatttaaaaaaaagaaaaaaaaatggtaagaggtgcaagatatactaagttgtcctttaccacagagggaatgacccagcatgccccagtttatttgaccacttaaaactttaatgatttgatagatctctaaattgttgtagggaaagtggatgtgaaccacttttgatcccctttcctgatacggattgaaaagaacacacttgtcatagtattggcttcttaccatcagaggctgtgtagactattctagtaaggatacggtatctgatcatggctgtgattagggctgccccgtggataatcatcaatcaccatgcttcagtgggtttttacaggggcagtatgtggtggatcctatggagatactatagggaccacctcagtatcctttaagtctctgagggaatcactaatttctacccacctgggatatgctattgcttctgatttactaccttgaccagcgggataattttagagacttctacttggtctttctttctataatggctcttattctacagatgacagagaacgtgagaatgtggcagaatgtgagagttctactatctgtgaagctatgcatcccaatttgtactcaagggctaggaaataaccatagagtaggtccacagactcactgggagatgagcttggctaggactctattaccatctggccttctatgtccccctctctgaaaggaggctataatggtgttttgggtcatctagaagcagtgaaagctcaaaccctttatctaacagacctcaaatgatctgrttattcccagttccacactgtacagctattccggtaaatagccagagggtgctttcgggaagaatcaaggaaacgtttattttatatrtttatagtggcattacggatctttctcttccatcagtgcgtcctgggtcagaactggctcaaagctggaaactaggtaagagattgcgattttctgtctcggcagctgacatcagcctctgctcactcaccttgatcttttgtggttaagtcaagcaagactctcattaaatgctcacctctcttgccctaaggacaccactgctgcagagccctgcagaccaaagacccctggttaacattcaggccttgctgyctgtcattataattgtgtccaccttgcctctgatgattaagtggccctatgtggtctctgctcttccagaaccttaatgtctccatcgacagtggccatggcattccatgggagtatctcctctgtcaacctgggctatggaggacacccagcactgagctcctttcactaggcacttctttattgctttgcaaagggaaggccttttgggccctcgtctctgagccttctaatccgtcattagtactcttccaaggctgtttcagcattgccacctcactgtcagccatcactgtgtctaaaccttaaggaccaattcagcagtgtgttaagaccagttccagtggtctcgccaggatgttaaattctgagtcaaaggaagggtccctccataaaaccctctttatctagctttgtattcctcagctcctcccagccccagtcccacatcctcaagatctcctcctatatgtgttttcctgttcctactaatatttgtcagccagacctgtagcttttttttgtgaataagctatttcctccagcaatggggactatatactttcctgcttgggcaatggtaagacctgaccctaattactggtctagagcaggggtaggcaaaccatagttccatgcaccagctgccygtttttgtatagaaagttttattggaatgcacgcacacttatttgtttacctgttgcccatggttgtttttgcactgtcgttttaagtgcaaaagtagaatcgaatagttgcaacagagaccacatggcctgcatatctaaaatatttactctcttgccctttaagaaaatgttttttgaccctggtctagaggcagtgaggaaaggagggaaggatctttaggaagataagcatcaccttgtgagacatccacctcaggtgagtcattagtgtggtcttcaggttatgggtgattgttctctagtaacggaaggagcccttctgcaggcctagaaggctcaaggaagctgagggtacaagcttctcaagtgcgtctatccaaatatctccattcaggtcctaatgccccattctttccctatcagaattctgaccctagggtagtaggtctgctgaggctgtgcctttagtstctcttgaagcttcaccccttttacaatcagatcctgggcctgattttcagcacagcctactcttgggccatgagagataagtgtcatttagaatgctgttatggagttctgtcttcacaacataccctgagttttcttcaaggtttctagggcaattaacaaaagccaaccaaccccataatccttatcattactattgccctgtatctttcaagtattagacttacagtgtaagtcagtgttgcccctgaaattttacctgtgcctcatcccaatccactacacacattgtggacactgtgatgctgtagtctgccaagagttatcaccaccttactcactaccagcatttgggtccgcgttgtcacttcactggtgagggatctgttttcagaagcccatcctgcttctgccatttctggtaactgtcttagtcacccccaacccccactccccaaacaacttgagacaaggacttgtgtgcaggtggaatgcctgggaggtagtccctggaggcacagcaggaaagtagagaatgtgagaaagaaaaggagaaggccaataaaggtgtcagtgaacaagttccactgtgtgcaactggggcttaaacctgctagggagcctcaaggaaaccgtgtggaacacaccctacaattttctctctggagtactcacctggctatctaggctacttatctaaggacactgtccatcaytgatagggctgcctctagggcctagtccagattgctcctcatggggtggaagaaattcctgtaatggtgaagaaaaccagagggatgaagacatttgaggtgggaaatcattagcctgccaggaactatctaccaaaggtttaggtgaacacagatatgggccagatagtgcctgakctcacgcccctaggaagtggtgaggggccaggatgtccacgctgatgactccagatcacactgcctgctcaatacaccagaaaggggaagtgcctcacccagggccactgctgccgtgacaattctaagaggaggcttgcagggacccacctctttctgtgcacctcctcagtctttgatgtaacttargttttctcaatcttatgtaaaatgctacccaaatgcagctttgaagcaagctccctgaccctggttttctgtgggattgcccacctgcctaagctccttgagctattttggagtcagtagctggaggcagggaggctcaggtcctagcttgcacrtcagctcacactgcagggccctagaatggagagtttgttgcttcargatttaacaagctgtgaagagctttcaagcatctgtaaggaattaaaaattagtgagtgtgaaaactttcctaattgtaaaacagtttcactgcccttgatccttgtccattgattctatttttgcaaaacctagttccgagcacagtgtttttaagttcagcaacatcgtatttttcagttagctccatcgtttccaaacgtgcctggatctaatttttctcctagcgcttggtgtgtcctggcaggttttttccctggggctggtgccaaggacaaggccaggctgagctctcagcacccgcaggactccttggcactccggctccacccgcgagggtgtgaccactcttgccttccccatgtcccttttatttccatggtggggagcagggccggtgagggttggggggcaaataaactgaggatgccttgagatcctgagggctgggccttaaaaatccaaccccactctgttctcagaggagtggagagagtcctttgctgcaaagaaggtcctggacttgttgcatttgcccagatagagcagcaagccccgctggccctattttcagtacatatcccgagtccagccacctttcatcacctccaccactg

SEQ ID NO: 9843 - DNA, 111918 bp, Homo sapiens
  misc_feature (72446)..(73585): n is a, c, g, or t
tttttgcaaactacaagcaaatttgctgctcatcaagtctcttgactcttacataaagactgaggggagctgggcgaggtggctcacgcctgtaattccagcactttaggaggccgaagcaggtggatcrcctgagatcaggagttcaagaccagcctggccaacatggtgaaaccccctttctactaaaaatacaaaaatttgccgggcgtggtggcgcacacctgtaatcccagctactcaggaggctgargcaggagaatcgcttgaacctaggaggtggaggttgcggtgagctgagattgcaccgttgcactccagcctggtaggcaagagcgaaactccatctcaaaaaaaaaaaaaagactcaggagaaaaatgatgataatttaatgccagaaacaaccatgtctctcctaatggtggactgtctttggtcaggaaacaagaacagtataatcataatttgatcataatttgaattttgctttggttgccaagaaactcggggtcaggttgaagtgcagtgactatataygtctctaggtttttggcacaaatattcctccctgactcaactgtttcctgaaacaaaaaacaacaacaaaaatttttcactcgtcaaacacaccatccactttctttcagtttccttttagtctttagccacatgaatacagcttttacgtggtcctcgctccacactcacactcaatttggttttctattttttcacagaatattagttcacaaataccatatttctatttatgtatcctattctgtcttctcaacaatggcacagatattccactgaatcatgaaatattgatagggttgaatccaactgtacataccataaatgggctattgttgaactctgtatttttccctagattttcactgttttaaataattctattacaaaaataaacacttaaaggttatgaagggagccatccaaagagaaatagaamcagctaataagcatatgagaagggttcaacctctctgatgattaaaaacatactttgaaagaagataagagtttcttttccctgtggaaatagctcagattaaacaacgaggtgacacaatgctggctggaagtggagagactcacagctgctgtrtctctctctggattgtgaatttgtcagtttcttggtgcagcacttactcttctaggccattcctgctgggagccgcagaggtacagctgaacctggagcgcacaggtttcacggcagcatcatttctaacgctgcaaagtttaaatgacgaaaatgtcccctaataagagagtgagtggttaagtaaatgtgtatgcgacttctaaacatatccactcactggatatgtaayggagatttctaataagacagggaaatgttacaatgctataatttttattgaaaaacagaacccaagatacaaagggagtcagatgacctccattcaaatagaggcactgccaatctccagttctgagactcctgggtcagagacagggactttattagttgcagtaaaataatagctgcagtttaagcatggtgttcacatgagttccttgtgtcttccaagtcctagggtcggtgtggagtgggcgaggtcaagggcccatcatggatggtggatgcctgcacacacaatgggctgcattacacaggagaacactgagtttggggaatttaccgattttccggtaaacttgtccagagggagatggtacctcctcctttgaggwtgctttttgcaaacacgaccctgagacacgggtacagagtgaccagggctttgcatttgtggcatactcagcaagaatgtgcaggaatgcccgtgcccatgatgggttcttctcccagcacctgggtgtggctcacctggactgcaagaatctcaggcctatgatcttccagtgggcctctggaagctggatgtgctgagaactagagaagggggccgagagtcagcctgggttttggggtctgaagcatgcttagaagcatcctggtccatctcctgcattttgcagatagggaaactgaggcccagaaagggacttgcccagagccagacagtgaatgaggagggggtcaggactggtgctcccctgtgtggtcctgaaggcacatcactgtcaccaccagcacagcagctgacagtgattacattacagagttttctctgtggggcttatgtgatgagagtcagcatctccttcaattctcacgaccgtgcaaagtgcaaagtcctaatccttgccccacgtgacagatgaggaaacaaggtaccaagaagtcaaatgctcaatgccacagagccagagagtagcgagcttggattggaacccaggtggtctggcctcagrccctgtcccaggctgtcaggacctctagctkgtcctgggggataggggtccatggtggtgcctacttccctgacacccagtgcctgrctttccaagtcaccagccacagggacaagaggatgtggagaggccatggaggacaggcctgggatgaggactagagtgagtgcctaaaaagggggcgccttggctgggcgccacggctcacgcctgtaatcctagcactttgggaggctgaggcaggcggatcacaaggtcaggagttcgagaccagtttgaccaacacagtgaaaccccgtctctactaaaaatacaaaaaattagctgggtttgatggtgtgtgcctgtaatcccagctacccccgagcctgaggcaggacaattgcgtgaacccggcagacagaggttgcagtgagccaagatcgtggcattgcactccagcctgggtgacagtgtgagacttgcctcaaaaaaaaaaaaaaaaaaaaaaaatggtgggggctgtgcctcagaacaggagtaagctcttgaagcttcaggaaaggctgggagaggccaggtttccatgtcctctctcctggctctggcctccctccccagctgttgcaggcttggctcagccctcctcctcccagcagtccctctgcctgcctagggcagtgtcagtgcctagctgaatgtaggagtcacctcctcctactgtccctgtttcctcatccccaccyccttctcagccacccacaacacagccactccctccccatccccagaaagggccccggtcacatcgccagcggccacctgctccatccccattgggacttctcagtcctggcttcactgagcactgggccacactgggcagtcccagccagaatcactttttttttgctatcacccaggctggagtgcagtggtacaatcttggctcactgcaacctccgccttcagggttcaagcaactctcctgcctcagtctcccaagtagctgggactacaggcatgcaccacgatgcccagctaatttttgtatttttartggagatggggtttcatcatattggccaggttggtctcgaacccctgacctcaagtgatccacccacctcggcctcccatagtgttgggattacaggcatgagccaccacgccctgcccagaatcactttttgattccttcttggatattgccttctcctggtttccttctacccctctgcctgtttctacgtcttctttctgaatcccccaggtcccctggttcccccttcgccctccaccaccttcccttagtcatctagactccttccagggmaccccattctccgatggcttaaacgaattaagttaataccaaagtagtaatgagttcccaacctgttccaactcagaaatgcctccctcgggccatctgctgatgtgctgtttccgcaccccaccccatccaaagtcaaaacggaccaggatctctggtgcctccaaacttttgcagagacatcaggaaagctggcaccaccaaggaaacccttcccacctctgctcacctttcactggccagtcgcatgtcacctcttcctgaggggcctccttaacctcagaggcgygagcatgctggtccccttggtaagctttcctgggctctctgcaaacttcaaacttataagacaccctgtggggagatgagttcttgtccttttgtttttcattttaaaatttaacatgtgaccgggcacggtgactcacgcctgtaatctcagcactttgggaggacaaggcgggtggatcacctgatgtcgggagttcaagaccagcctgaccaacacggagaaaccccgtctctactaaaaatacaaaatttgccaggcgtggtggtgcatgcctgtagtcccagctactcaggaggctgaggcaggagaatcgcttgaacccgggaggtggaggttgcagtgggctgagattgcgccactgcactccagcctgggcaacaaaagcaaaacaccatctcaaaaaaacagaaagaaacaacatgtattcagaaaagggcacgtaccataaatgaacagctcaataaattctcacaaactgagcccaaccttgtaaccaatacccagagtaagaaagctgaacctaaccagcccccgaaagcccagcacgctcccactccaggatcaccactctcctgacctctgaactgttcttgccttttttttttttttttttttttttgagacggagtctcactccgccgcccaggctggagtgcagtggtgagatctcggctcactgcaacctccgtctcccgggttcaggcgattctcctgcctcagcctcccgagtagctgggactacaggtgtgcaccaccatgcctggctaatttatttttatttttatttttagtagagacagggtttcaccatgttggccaggctggtttcgaactcctgacctcaggcaatccgcccacttcatcctcccaaagtgctgggattacaggtgtgagccaccgccaccggmctgttcttgccttttatgtaaatggaatcatgcagcgagtgttcctttgtggctgactctattactctgacttacgtctgtgagatttacccgttatgtgagttgcggatcattcactcctgttccgtttgtcgtgctcctaagcccgaatactccacgatattcatctgccttgatgacgctaggcttcccaattggaggaattatgaatgtgcggctacatgtctttctgtcttttggagcacatgttgtatgcgtttctgctgagtgtaaggctgggcggggcgtcggtggctcaaggggtccatggtgaactcacaggaacaccgctttgagctgcccagtggcgytcctatgcgtctcatccagttcctccgcatcttcacctgcaccattttattcttcttctttggaaaataaatctacytgtggttccaaagcctaactcatcctcagtaaccccggtagcyatgaattcctatwcaagaggctcccgcaggcccagcgccaaagctgcctcccctgcagcctcggtgacttcccgggtctctccctccggccctggtgtcccgggtgagcccagcacacgttgggattttggttgkttgttgrcctggcccgactgtccctgtctctgagggcagagtcgggtcccatcccgggacacgcctggggttagccaccgacctgcagcctcccggccgagggtgcggggwtggcggtaaggcctgccccagtgccccccagcagccgggcctccgactgcaggcccgggtccccgctcctccgcgcggagtcgggcggggataacctttgatcccgagccctcccctcgagagggggtggggggaggaggggatcgggtttcacggagtgttgggggataggactgggggcatccggcccgaaggcgccccctctgtgccccctccggggaagtctggsatccaggccctcgcccccagccgtgggcgcgcgcccctcgcagccggggtccggggagggagggtcccggcagggggcgccggggagggaggaccaggagacccgcggccccgcctccgccgcgccctcctcccgggcgggataattgaacggcgcggccctggcccagcgttggctgccgaggctcggccggagcgtggagcccgcgccgctgccccaggaccgcgcccgcgcctttgtccgccgccgcccaccgcccgtcgcccgccgcccatggagcgcgccgcgccgtcgcgccgggtcccgcttccgctgctgctgctcggcggccttgcgctgctggcggccggaggtaggggcgtcccgggtccgccgcccagcttagggtcccgaccccctcggcctcgcgctccctgcgagtttcggaaccacggggactcggagtccgtgcgttgccctgcgcggcgcccccggactgtcagcgccgaggcctcggcgacgcccccctcccccacggccagctccggtcctcatctcctccccggcctggggacttgtttcaaaaccggattcccccacccctcaaacacaccgtcctaccccagtcctagcaaatccagccggctccgggggccgcatcccgggccctgggggttcaggggcgctagctgggctgggggacgctggctgggggttaccgagcccagggcgccttgcacttgacgctggaagcgccctcggctatctttcctcaccgcttcccgcctccacccccaggtaggagctgttgtacccagcttgcggatgtgaaacttgagcctggagggtgggaagcagtcttttccccaggagacactagcggtcctgggataggggctggagaggaagaaatgagaaagccagggagcagcctggaggtttttggggcgtagctgggaggatggaggggatgcggacctggccacctcctccctgcctccctcccgggacagagggcccaaggcagkggttctgccgggctcggtgctcagcggggactggggactggtcacttccaccaayggcaagggggatggagttttccaagagcagatctgatcgatggcccagaccttaggccccaactctgggactgacagctccgggacagtgcccacccagcccgcgcttttctcccctctaaccctcaaggcctggtccctggggggmctgccacgaggtcctctgatcagagcagctgctgggcggcagagctatgacctgtgacctctctgctgacccgtggcttctcagagccactagccaggcccggcactcctggcgtctttgtttctccagtggcccaggtccaggggagtgccctagaccaccctcagaatccgagtcttaatccctggtttagttgagttccttttaacctctggtgaccgcctttgttagtcaaaaggtcgcttgtcccaactaatgctcactgggggattccaggaagggggctgaagggggctggagggggaggggaggctgggagctgagctctacagagctttcttgactggctggctgcagcagagccctgtggagctctgattgttcaggcggtgctgggcacggcctgggcacctcgtggggttggagatggtgtggggaggcgcagagctcagtgttggcaccaggagccttcgcagcccctgggggctccctggaggctctttagaagagatggagcttgatgtaaggggagcgcgggaagagggcattccagcaagcagcaggccgggtggctgccagctggagggaaaaccccgaggggccctgggtgatgggtgggtgggacatccgagactcctgttagaaaaggaaggagcctcagaggccccgattgtgtcgatgaggaagctgagggcctgagagaaggcgtggtaaaactctccctggccccggagtctctgcgttccctctcactgttcttttctgtctgcggtttgcgaacaatttctccctatgtgtgtgtgactgaatgaacaccccaggacttgcgggcccagtgtggctcactgctgagccacagagaagtttgtaattggaagggtttaaaaaagcctcctaattgcacacttcgataaaagcagctggatgtcctgtgggccttttgtttcttttggggagaagtctctttgagtttcaacaggtttaatttggtacagtttgggaaggggcttttgaagactgcctggcccctatctgcagctgtgaggcccccgaagccctgtatgtaaggccacaagtggcaccgcccctgctctcagagagctgtggggccgcagatggtgagcctgttagctgatctgcagaaactcctttggcgacggccgcttaaatggagaagggcgctgatctttcttgccaaacggccgagaggagccgcctgtctgtcctgtgtctgtccgtcccgttgggctttactgagagctgggtgggagggagtggagaggaggaggtgttaggaaaagacgattgtgttttctccaaggctttcttggcctctggctgcagccgggcagcgtttccgactgattaaaagaaagttgggagggagaacaaaggccagggaggacttggcttgaaaacgtgtggtctgtgccgccactcctggaagtttcccagtcaggaggtgggggccagggcactgaatgcatgaagatgagactctgtgccatgggggtcagggctggggcctctcctgcagcacccacagctctggctcacgccccgctcctggccctgctgagtgccccccaactcagggctgcatttgccacccctgttaggtgtgtagggcaggagtaggggcacgcggctgactcatcttcaggtcctggagggctccaygggccttgtgagactagaaatcagtttgcatcagaaaaagccatgagatggtttggtggttttctcatttataaaatgaagggaacaaaaacctacttaggttgtcttgaggattaagagagagaacataggatagtgtctaccatggcagctatattattattattattattttattttatttttgagacggagtttcgctcttgtcgcccaggctggagtgcaatggcatgatctcgactcactgcaacctccgcctcccgagttgaagcgattctcctgcttcagcctccccagcagctgggatkgcaggcgcccatcacgcccagctaatttttgtacttttagtagagatggggtttcaccatcttggccaggctagtctcgaactcctgacctcaggtgatccacctacctcggcctcccaaagtgctggaattacaggtgtgagccaccgygccggctggcagccctgttattaatgttagctattattcctgttgtccccttctctaggaagtgttggcaccaggagccttcgcagcccttgggggctccctggcggctccttggaggagatgaggcttgatgtgaggggagcgcgggaagagcgcaattctgccaataccccagaatygttttccccaagatgcctctgcacattctactactactgaatttcccagccaggcgctgagcagaaggccccatggggctataggactggtagtcgtcagtrccaaacccgtgtcaggaaaggtggtgttcttagccattcagtcattcattcactaagggacagctcagtgccagacactgctctataacttgtggatgtggcaggaaaggagagagacccagtttttccccctcatgcaactaggagatccagaaaaatgaactgagccctactggcagagtcagggaagacttcccggaggaagcggcatgcaaactgggaacctaaggaggaaaaggcagtggctaagtctgtgggtagggctgggaggatgggggaaagggtgttcctggcaggggaaatggcagggccaaatacctggaaggaagagaaaacacgagacttccagggaaaccccctccttctacccacttccagttccttccagttccaccccctcctcaccactgggggagactgtgctgtctagagacttctccagcagcttccctgacctggtgagactttaagcccgggctctgagcactgggcacctggtcagggccgccttccaggtgaagtttattagaacagttctaagagggcatgtagttattttgccagcatattttatacaacaagattttccttttgcagaatagcaaatcatracaatttgatgaatgaatcctttcgtaggccccatatggttccagtttccttgtgatgatctcacatgtggccctataagtaaacagggtgggaggggggaaccactgtgtcaacttccctgggataggagaccccctcaggctggaggggagctcaggactggctaagtcatctgccacaagtcacccagcgaggagcggggctggggctgggcctagagctgggctgggccccacctcctttaaccccacagtggtcctaactagaggctggggtgggagggagcgaggcaccagtcgccatagcttcctacaggttatttgcgggttactacactgtgcggagccaacatgagaagggggttaggaagctgtgtgttggtcccaattctgaaagtgtctggagagatcttgatgacacccacaaactctctgcctctgtttccttcactataagatgtgagtgtcctctgggtaattattataggtgaaatgctttacatttagtaaccaatgtcgtcatctcagcagccytackaaataggtgatccagtgttgttttgaacctatttttattttttattattatttttgagacggggtctcactctgccggccaggctggagggcagtagtgtgatctcggctcactgtaacctccacctcctgtattcaaaccattctcctgcctcagtctcctgagtagctgcgactacaggcatgcgccaccacacctggctaatttttgtatttttagtagagatgtagtttcaccatgttggccagactggtcttgaactcctgacctcaagtgatccaccygtctcggcctcccaaagtgttgggattacaggcgtgagccactgcgcctggccctgtttttcattttggatcctgttacccactggagtgaaaaggtcctgtgagttttgctacctaggtatgaagcccggcttcttgttttggcctagaactcctctatggacctgcacagtgccatttctgagagtcactgatgcgtgtgrtaggttgaggatggaaatccaacacctgtgcacccagcatggtctccccacagcacggggactcgagcaccttcctgccccacccctgccccagttcacctgtgttacctagctataccctcaccctagccctgcawaggaggtgctgtcattgtccccctcatcaatgaggggacatggaggcccagagagtccaggtagcaagactgtgggtgcatagctgctaagtgacagcagcaggacttgagcttgggcagcttggccctgacgtcatacccctcaccagcacactggacagcctcgcgtatctttttttttgagacggagtcttgcactgtctggggtgtgatcttggctcactgcaacctctgcctcccaggttcaagcaatcctcctgcctcagcctcccaagtagctgggattacaggtgcccgccaccacgcctggctaattttttgtattcttagtagagacggggtttcactatgttggccagagtggtctctaactcctgacctcgtgatctgctcaccttggcctcccaaagtgctggaattacaggcgtgagccaccgcgcccagccagcctcacgcacctttagaagacttgaatctttaagtctagttcagggggggatgcctgtttcctttggagtgtgatggtggggtgtgtatgagctttacagtcagagctggatctgaagcctgcctctgcagaggctgcatggcctcgggcaacttggtgattctctctttgcccccactttatagaatacctaggatcatgtgagatcatttgtgcgttcattcattcacggacatttattgaatgamtgcttagggcaggcatgggggcaggaggcagaatgagacagtgtctggctcagactcatggcactaagtacagagttaattatttgtgctaagtgctgggaagctcagagtacaaagagaccatgcaagaaagaaaacatatttgtcccatgtgcatgcgtgtatatgtgcatatgtgtgtgcattggcggtagttagggaggacttcctggaggaagggacctttgagctggtgtggcatgaacaagctggcctgaggagagcaagcgtcctgggaccctccagcctttgaagctccaggttccaaatgccaggtgcagaggatgcatgacaggtggccagaggggtgagaggaacaccaggggagatgcgtcctggaagcccaggaggcccttggagcagggtgggatgttgcagaaggatgaggatgcccctctgtgcactgggctgatgtaggaagttgctgccggggccagagctgcctggagggaactgtggggagaatgcttctcgccttcccagagaggtaccttctgctccttctctcttgctgcctcctcccggctggttcaccatccaagacccctgtcatctccatgacagatgctgggaacaggctcagcagtggacacagtcaggtcttgtgttggggatggggccaggagccctaagagcaggctccagttcgccctgcttcctcctgcagaggccaggtggtcttgaagaggggacacgagyctgtcctcatcctggaactgtaagggatgcagggacataggccaatctggctggacccctggtggcttcccagacaacatagtaaaactccgtctctactaaaaatacaaaaaattagccaggcgtggtggtrggcgcctgtaatcccagctactcaggaggggcagggtgcaggtgggggttgggtggagtcgcccagtcctgtttggttggaactttccatcagggtctctgtggttgacatcttgttgcatttcaggcttttcggttccttggttctggacaccacggaggccactccaactctttgctgtagctttagacaatgctgtggggcaggtggggtgggggcatgatccttttgtgtggtgagtccgggaggcacacaggatgaagcctcaagctcccattcacttttmmaaactcctgacgccctcagctgcctctgagtttttgagcttgagcagaggaaatcaaggaaattgaggctggcttctgatcacatgcctttacttcatccccasctattcacggagctttgccaacttaaaatatcctcatttgcccgatgaggatattaaaataaaaaacagacacccattcaaccaccatctcatatcgtcaccacttcacagaggtaggggacattttaatgccccggattttggaaggacgcggtctcacaataaaagacagtattgtagatggaatcgggccggctttgtagaggtccctggatcctgctttgctttcaccctattttgttgcaacccagtggaaattttgccagagcaatgcccttacacagggtgggattggggaagcctgctcttaactgcaggccaaatcctccattcagtttataaatgaaaaaactgaggcccggasttgctccgggtgggaaaactctcaaccatgagatcagaagcagactccaggcctcccggttcccagcccccagtctcccctctgtgacagtctgcttgctcagcaacctgggaattaagatcctcgtggctcacaggcygctggggatgggatcaggcattgcccaaagcttctgcgatgtttacagctagcaggctgacattctggaagcttccacccaaggagtggtacagaatctctctgagcatctgtagtcttagaaagagcacgtggccatatccttcctgggtgtccagggcatggtccccgcaggccatgtgacctgtgtttctctgcatgccttggaacatggggcatgccgctgatctacaccataatctttatggaggtttaactcacctggaaaaaatttagttttagcagctgtcccaggcaacaaacggtatctgaggcctgtgaactgagccagctccatccatctgcaccagttactccggcaggcatgtgtctctcctgaagagaggtggtggatgtggtggcgtgttggccatcgggcaccgtgtcagcctggaggagtgtgtggttcctttgaaaaagaatgttctcccaatcctggtgtgataacttttccttttgtttaattttgaagcttctgttttttcctgtggtcagtgtgctaatgtaagcacttttcctggattatctcatcaatcttcccccattttttttttttttgagacagagtttcgctcttgttgcccaggctagagtgcaatggcatgatctcagctcactgcaacctctgcctcctgggttcaagtgattctcctgcctcagcctcccgagtagctgggattacaggcatacgtcaccatgcctggttaattttgtatttttagtagagacgggctttctccatgttggtcaggctggtctcaaactcccaacctcaggtgatccacctgcctcggcctctcaaagtgctggratwacaggcatgagccaccatgcctggcttttttttttttttwaracagtctcactctgtcacccagsatggagtacagtggcacgatcttggctcactgcaacctctgcctcccgggttcaagtgattctctcacctcagcctcctgagtagctgggatttcaggtgcccgccaccatgcccarctaatttttgtatttttagtggagrctgggttttaccatgttggccaggctggtctcgaactcctggactgaagtgatgtctgcccacttcagcctcccaaagtgctgagattacacccatgagccactgctcccggcctcttcccccatttttacagatgaaggaagtgagcctccttgagtcttagtaagggaggragctggattcaaggctgagcagttttaacccgcagcgttgccttccctgggaacattcgagttgaaggttaacgagattttgcaagagtttgctcttggtttatatctaatattatgctttggatctaactcacatggtcagatgcaggggtcagattgagactggttgattgaaactcctccgaaacamcaggaaatgatctgggagagaagattccaggtcccctgaggccctgcttctctcttgatcccccacagcccagtgtcgagttaccagcgagtgcctgttctgcttgggtgggtgtccagtgtggkactggtcagaggtaatttttggatctcagagctgctcacagctgttggcggtctgggatggaagaagcaggcgtggcttcggttggcccacattatcctcctgactcacagtgttccagggctgctcagctgccctagggtttgtgtacaaatggccttgatttgacacccttctgaaggtggggggcctgactgatcaggcagttggttggatgctgttgacccccgcagaactcttggtacctatgaggcgtggagttggcgtgggggatctgttagccccagtcccctttttgcccccaccccagcctggccgagagtcctgggcaggcactgagaaggcaacacatggggtaggacttgatgagcaggtggataggacagtgaggtgggaggtgcctctgtgggcctcagatggtccccagcctgtgtgatggggcagcgaagctcaggacacctggtgtttggatatccacaggtgaccggatccccaggcaaatgagcagctggaagtccctgcagggatgcgggaggcacagccagggtggggctggaccccaggcccttccccactcccatcgccccaccctcacaggacacacgggggagctgtgatcctcagggtgttcttttgtttttagtttttttgttttgagacagggtctccccctgtcccccaggctggagtgtagtggtgcagtcgtggcccactgcaagcttgaactcctgggctcaagcgatcctcccacctctgccttccaaagtgctaggatcataggcttgagccaccatgcctggcctttttgttgttgttgttcttttgttgttgttaagtcatctttattttggttgcaaagttgcaatctattttttactgaacattttaagtctcrtttgaagtttcayagcttgccgtgtaaaccattgcatacactgtcaaactgctgtacagaacattytgaaatacaatctactaaattaattcgcttgacactgttcagattactgcatgaaaacaacattgattgaagaaggcaagtaagtcaacgggcaaagcatcgattgctttcctactgtaggatgttataagatgaccracaaacactaaattattttgcttaaaagatgtactttttattgtggtaaaataygcatcacatgggatttgccattttaaccatttcctttttttttttttttgagatgtagtctcactctgtcrcccaggctggaatgcagtggcataatccctgctcactacaacctttacctcccaggttctagtgattctcctgcctctcagcctcctgagtagctgggattgcaagctcaccccaccaaacccggctaaytgtagctgggattacaggcgtgagccactgcgcccggcccattttaaccatttctaagtgtayggtccaatggtattaaatacagtcacattattgtacaatcatcaccacctccatctccagaacttttcatattcccaaactgttaratactaactccccgtcctctcccccgaagcctgtggcacccacccatccttttccttcctgtctctgacaaattccctacaaatttaactcctctagggacctcataggtactcttatcctgggtcaccatacgtgccttactggcctttcttttcataaccagagtaaagcttgtttattttattttgagacggagtcttgctctgtcgcccaggctggagtgcagtggcgtgatcttggctcactgcaacctctgcctcccaggttcaagcgattcttctgcctcagcctcctgagtagctgggattacaggcatgcaccacacgcctggctaatttttgtatttttagtagagacggggtttcaccatgttggtcaggctggtctcgaactcctgacctcatgatccgcccacctcgacctgctgggattacaggygtgagccaccgtacctggccaagcttgtttatttaaaaggggacagagacaactttttttcgtttctaatcggaatgtgtcttggaaaggatatgtctgargggtgggagtggagttggttttgtgcttcagggaacctgttcctgccctgtcccaaggtaagcttgtaaagaggtcggtgcccttgttttggaacccaagttaatgacrcaccttttcttgtgtgggctacacacatctttaacctgctgcagatagtacttttgttggcatctggagccatgatgccaggcccctcttctccctgaagctcagttttcctctaatgggtgggaggtaaccagtgctgagtccactaggaagatcgaggcacatctccaaggctaagaaaccggcagttctgtagcctcagccactccccsacccctagctcatcccyggcttttgccgaaattctaaccagccccgtattttgtgtgggtgggctccagcccctcgggattttcctgggggtcactgcctccaccccctgggacgatggaggaggaggaggcttgtttgtgggggcagaggatcttgccccagcagcctttgcatgtcaagagtggtcttgcagatcgggccccttgccctggctctgtttaactggtgcttactgagccgtgacgtttgtgctgggcatgggcaggtgcgacatggacagtgagaggaggaagacaccatccctggccccgaaggaggttttaattcaggaggagcaagaaagaacagtgttggaggctgccaggactgagcctgatgccagaactcagggcccaggagccgtgggtgagagcagtgggcaggagggcgtgggggcctccagtgtccactgagccctgtgaggagctggtcacacactggtttgctgtgggagcagggacaccttaacatgtatgttcatgtcactggtgacttgacgcttttcagcttcctctgttcttaattccatttggagcccaggcaggatgatagcagaatgaatggaaggggttgaggagtgagagccggtgaatgagaggggccttgtctgtaggcctttgtgggtcagggcccggcaattgattggtgagtgttacagtgaggatgatcgtccacctcttgggtcccctccccatgcctctgcctcgtcgccatccagcctggccatggtccctgcttggctctttgtggactccctgatggggctgtgcagragctctcccttggctaatgacggggtgagctcagctcccctcgggcacagcccccagacagccctgctttgcagagttcagctctggggctgctcagaacatgggagctaccttctgagtttccggaagaccaaaggacttcacatttgattgtcctgctgagagtgaggttcacagtacccagactccccagcaggaagcatttccaaaccgtttctgcagctctgggtgcaaaattcccagggctacgggagcctgcccttccctgtgttttcctttctcagagtccgaaggaggctctggggccacagctcacctgcgggggattccgcacaccagcwcccggctgtgtctcccccatttcttatgagcagcgataagtcaatccccttcgacggtttaatcctccagcsactgtttacagaraactttctgtgtgcttggaactttataaagtgcatccctcttctcagcaaccctgggaagacagtgcaagccccgttttcccactggggaagctgtgattcagagaggcgrcgctgcctgcccagggttagagagcaagaaagtgctggagctgggattggaaccaaaggctgtttggctccaaagcttacactgtttctactcaactctgtagctgccacatgctggcatggatgtcgggggtatacaaggacaggagacagagcctgccctcaagacatttgtggctatgagggtaaggcaggcaggcagggctctggaggatggagagacatgcgccaggcacggggtgatatgggagcagaggggcacccgagctatgcagggtgggcaggcaggcggccaggagagggtgacagggcatgggaggtgggctaggataggagacgggctgtggaagacacgagggtgaaactgcaggtgggggctgagtgggcctggccagagaaggggtgaagggagtgtggggacagacatgggaaccggggttggctgcagaaagggtgaagggggtagggggacagatgggaactgggcttggctgcacaggggagagcagcctcgctgtcaggccacatggctggatcacatcctgttcatccaggagtgcaccacggcctgtctcgtctgtaacagataaggtccttggcttagtgagtacttttgcttttcttaatgaattagagcaagaatgaatgaatgagtgaatgggracattcaaggttatccccatgataacacggttgtcactcctgatgacttttcctctggtgctgggaggcaactccagacaacttgacattagctctgcctcctggtgaatctcacgttcaccgaagagcatcgctggagaggggacacctgaggtgggaggggggctgagtggtcaggctgctggaaactgttgggctttgctgtggcacgaamcttcacccttacccacgccactgcaggactcctcctgccagcctcggggagccgggtgagagtcagaagggtgggtctaccttgcactgcagaaagcagctctgagtttcctggaagccctggggaaaagggaaagcccagaagttgtcactggggsacatggttctaggtgagacccccctcctcctggccttgtggaatggcctggctgagccctagctcattcgtgcactgaccttatccattctggaatgtttctgcaagtttcccctcctcccctgctgagaacgggatggagcatctgaaggacgcatagtctagaagtgcttacagtggctgatgactgatagggtggtttagcaaggtgctgcctcacccagcagacagcagccgccctctgggccaccccgagggcccagcctggaagaagaatgtattcaggcagggcacccacagttgtgtgtgcggaaacgctgccaagcccagtgggatttaccctctaggggctggaaagccattaggaaggaaaagtggtgcttcttaaagcccagttttgtaacatcctgccgagaggtgaccttctgcccagcagctggggctgtcgtgctaatgctttctggcatttgagtcctttagaatgaggtccaagtatgtgggcacctggcacccggccgctcctcccttggggcacaatggggtcttctcccttccgtgagctgaggggctgggagggtgcccactggggctgtagcctgggctggggcatggggcacaagggcctgtgtgcccagctcatttgggccrtggcctggctctgagggtgtgggccggctgcttggagcgtgatcctttcatctgccctttttgcgagtgggagataagatggccaggctgcggttactcctgaacctgtgctctctgctttgccagtcctgtcctcaccagacttctcacaggtccccgtttctgtggaagaggggatcttgtggtaagtcaagggcagaaaccatcaccagcctcggtttcctcaatctgtagcttgaggcttatgtcccccctcctgcccctttgctcccaagattaaaggagaaaacacggatgtgggtcacagaagctggtctagaaatggtggtttttaggctgggtgcggtggcttatgcctgtaatcccagcactttgggaggccatggctggccaatyacgcaagttcaggagttccagaccagcctagccaacatggtgaaaccccatctctactaaaaatacaaaaaagtagccgggcgtagtggtggscacctgtaatmccagctactcaggaggctgaggcaggagaatcactcgaacctgggaggtggaggttgcagtgagctcagatcgcgccattgcactccagcctgggcgacagagactctgtctcaaaaaaaaaaaaaaaagaaaaaaaaagaaaatttttttttccttyttacttgactcagctcgttgcattttgaaccccctccctgtttgcagtctctcctctggaaagagtcatgtcggctgttccctgacctgctgggctgggctggccggcagcatggccgtgcctctgtcatcaggggctgtctttcttgcctactggactgtgaaggcagggaccctgtctggacagggaccgcatcagcatctccagcatgtggctggagcagggatccatgtgtgcttggatctcaggggctgagccgcagccctgtccaagctggattcagatgggggaggattcaggtctttcttctaggaaggagtggggtgtggactcgcagctggggtctggtggggttttcagtactggtttgcagagtgactaagggatgtgcccccagcctgatgctgtcrtcaagacagaaggacgtgcgtgtcctggtggtgcatctgggagggccctccacccgctgagtggtgagccacctctcagcttgttctcttccctgcacagtggacgcggatgtcctcctggaggcctgctgtgcggacggacaccggatggccactcatcagaaggactgctcgctgccatatgctacggaatccaaagaatgcaggtacgtttgccagtggccactgtttcactggaacaatgttcctttagagaaaagtgggggaggaagggacagtgtgtgccagacctctcgggagaggctggacacccaggcccggatccatccaggctgcgggtgctgcagtgggtgactcctgcctccctcctggcaccggcctggcaccgggccttggctcacccttcctgtgccactctgtgattgtcggggtatgtgtctctttcactgggctgggagcaagaagatctgggcttgcagctgtgggcaagtcagttttctcttttaaaaaaggggggacagttgtgggggagcaaaggagatgatgtgactaaagagctttgcgagtggaaacacggaccacctacagaccccaaaaatgccaatgagccggcgcagagtgaagcgttccaccagccggtttttcagcttctgcagcagccaacatctggatcgaccgtttttattcttctctccctacattgactccagctctctgaaaattctgagaccgtgtaagcttagaataaataatgagaagccgggcgcggtggctmacgcctgtaatcccagcactttgggaggccgaggtgggtggatcacctgagatcaggagttcgagaccagcctggccaacatggtgaaaccccgtctctactaaaaatacaaaaaaaattagctgggcgtggtggcatgcgcctgtaatcccagctacttgggaggctgaggccagagaatygcttgaacctgggaggcggaggctgcagtgagctgagatcgcgccactgcatttcagtctgggcaacaacagcgaaactctaactcaaaaaaaaaaaaaaaaaaggaataaatgatgagattaggtcatgctgatcatcatcataaaaataatagtgaaaaccccagaatgcccgtgtggagcacctactttctgtgtaccgtctgcacggacagcagccagyctggccccgggaaggacaagggctggggaggtggaccaacctggttgggtttcaggctgggtgacctgagccagctcaaaggcaccatgatacctcctttctggggttgttataatgatcagagatcacccgggcgcggtggctcacccctgtaatcccagcactttgggagaccaaggcgggtggatcacctgatgtcaggagttccagaccagcctgaccaacgtggtgaaaccccgtctctactaaaaatataaaaattagctggytgtggtggcgggcgtctgtaatcccagctactcgggaggctgagacaagagaatcgcttgaacccgggaagcggaggytgcagtgagctgagaccgttcattgtactccagcctaggtgacagagtgagactccgtgcccccaccatcaaaagaaaaaaatcagagatcacctatgaaatcagcaccacaaagccagactgtggcaacgtattggttttctaggactgccagagcagagtataaggggcagggtggctcaaccaccggttcctcatagttccggaggccagaagtctgagaccgaggtgtcagcagggtgggctccttctgaggctcctctcctgggcctgtagatgccctcttctccctgtgtcctcacacggccctccctctgtatgtgtctgtgtcctgctcaccgcttcctcgaaggacaccagtcctttggattacagcctgccctaacaacctcatttaactatgtcacccatttaaagtcactgtctccaaatagagtcccattctgagatactgggggttaggacttcaccagatagattttgggaagacacaatttagcccataatagggagccactactattaatacttagtgaaataaaagaaagtgaggcatcagcccgtgtaacccctcaacgtgcaggcagaggaactgaggccgcagattcagcagcactctgggccttgcttgtgaatggggattttagtcactatcaaatgtattactgacttctactcactaatgtctttgrtaaattttggagttatcttttttctttattttttgaaactgagtcttgctctgttgcccaggctggggtgcagtatgttgatcttggctcactgcaacctccgcctcctagattcaggygattctcctgcctcagcctctcgagtacctgagattacaggcacacactaccacaccaggctaatttttgtatttttagtagagacagagtttcaccgtgttggccaggctggtctcgaactcctgacctcaggtgatcctcctgccttggcctcctaaagtgctgggattatgggcatgagccactgcgcccggccaattttggggttatctttaatctccattgagtcccagaggacaaacacattgccttcttagaaatttcagacatacattagatttcctggaatgtaagaaataccatcagaatggctgagagggcattccttctctctttaagtgcgggtgcaagtccasactcctgggtatcgtgagtttccatatgacagtgtccctgaaacacgtggctcaatgcccaggacaccactccagggtcaccagatgcaagtgactggcccattgtgtcacttaggccccaggaggcccattgactcatcccagtggacacacaggccaggggccacatacctgtcctaggctgcctctcaagtgagctactgagctgcccagctctgcctgcgtcactgccctgtggccccaggtgctgtccgctgccctccagcccttcctgtgtgcttcccctttaccctgttctcactggggtccaaaccccacgcagcctgtgccaatcagaggccaagcctgggctccaggtcacagtgagacggagcccacataagggttcaggaggcagtcactgatgtggctgtgggggtcctcgggtgagcaggaccccgccccagcctccccaacctggggaggtcagagctcctgtctggttgaggcaagggctgtggatgcggggtgtggccagcagtgcagtgatgctaatgaagggattttctaatgagttttgtatagattttcatttttaatgaaggcagggaagggatagggcagatcagaaatcaaatcttatttacaagaatcctcttaatagtgatatttaaaagatgcaaaaaacagggatcactgaccacctggtttgtctgttgtgttagccagctctttttttttttctttttgagatggagtctggccctgtygcccaggctggagtgcaatggcgcaatctcagcttgctgcaacctccgcttcctgggttcaagcgattctcctgcctcagcctcctgagtagctaggagtacaggtgcctgtcaccatgcgtggctaattttggtatttttagtagagacgggagtttcaccatgttggccaggctggtctcgaactcctggcttcaagtgattggaygcctcagcctcccaacatgctgagattacaggcatgagccactgcacccagccaaattctcttcttttgaagtggctttctgtgaggctcaccagctgaagtaaaatcagtttttgttcattcaacaaatctttattggttcttgatgctcaggaagaggcaggatgaaagccatgagcaggcaggcaagcccaggccagccctcctggcagcagtcgagggtgtgaggccctgagggtccatagggcccaaaggagggggtatcagctccctgagtgggtgagaggctcagagaggactgcagggagaggccgacctctccgcaaccatgggctgtagccaagcaggggttaagcagcctgcagcttcaacaaggacrtgtttggggtggtcagaagatggcagctttgatgttttcccatcatgaatcatcttgactctaggtctccaccaaggcccgacattccttgggatccagatctaaatccacctaaaastttggattagattaaacccacatgtccttcagcgtcttttggaggaatctggacacatccagtgaaacctaaagcaagtcccaagytgacattttccagcccagcatttctctaaccccttctttattttgcaaatctcactgagagcctgctaggtgccaggctccgttctggtgagtggggatcaatcggtgaacgaaatatgcaagtcccctggcctcgtggaggcggcattctataggggatgcagaatgcaaagaaagtaatwagtccgtctgatggtttgtaggaaggcaggatgtgccgtgggggaaacagggaggcataggggcttctgctcatggtgggtttataattttagagccgtggggttggcctcactgtgccaggacctgaatggggcgtgggcagtatggaaagtgggaagagcatcccaggccgagggaacagccagcgcaagagcccagaggagagggtgtgtacagcaaggcggccagggtggytggagtggagccagcaacggccagtcccagggaggaagcaccagatacaagggtaaccaggtggctgagggggccatgagatagaggctggggtgttgggggtgagcctgaggcagctggacaccctgaggtgcctgggacacttgattgcttccaccttttggatgttgtaaataatattgctgtgaggccgggcgcagtggctcacgcctataatcccaccacttcgggaggctgaggcgggcagatcacttgaggtcaggcgtttgagaccatcctggccaacatggcaagatctcatctctactaaaaatataaaaaattagctgggcatggtggcaggtgcctgtaatcccagctgcyggtgaggctgaggcaggagaatcacttgaacccaggaagcggaggttgcagtgagccctgatcgcaacattgcactccagcctgggcgacagagcaagactccatctcaaaaacaaaacaaaacaaaacaaaaaacaacaacaaactgctgtgaacatgggtgtgcaagtrtctgtttgaaaccatgcttcagttctttggatatttacccagaagtggaattgctgggtcctatgattattctatttttaattttgggaggaactgtgctccacggcagctgcacccttttccattcccaccagcaatgcacacgggttccagcatctccacatcctcaccaacacttgtgattttctggctagccaatagtttttgaatggatgyacgcatggctggtggctcgctctggcagtttagtgaaacgccgttatttgcaaatccaccgaaagcatgagtgaaatgtgtgctagctcagctcggtaattccatcctggagcctgaaggcagttttgagacacacgggcagccgggttcagacctccagtcccccagggaaggttgggggaaggtgcactggcagctgccatttttgtgcagaggtggcctggctggcagtgcagggaagctggggaggcccccaccctctctcctggaggcacgagttgggtggctcttcctgcccttgctggctttggctggagctggggttattttgggtctggtcaggggccacccrtgacacactcctctcctgctcattgcctttggagcccgcccacgccagcccctagctgtcacagcctcatggttgtgttggaggagctgattttggcaggtcgaggacctctccccagagccccggcagggctgggaggtgtgggctttgcagctaggtgccactgcagccaccatccctccctctggggccttgggcaggctacccaacaggactctcagaagctgtttgctctgagcctggaagatggaacgagcactgagaagagcttgacctgataaaggggtggaaggttgggcccagagtcagccccccgccgctttttggttttcaaatcagcaggaacattgtgcgggtgaagcctagtgctcagaggagtgacgcggccactctggtgacaaaactgggcctcctggctctgactccagacaccatactacattctgtctttctttttttaaaaaaagaggccaggcatggtagctcacgcctgtaatcccagcacttcgggaggctgaggcggggggatcacccgagctcaggagttccagaccagcctggccaacacagtgaaaccccgtctctacaaaaatagaaaagttagccaggtgtggtggcgcatgcctgtagtcccagctactggggaggctgaggcaggagaatcgcttgaacccgagacgcagaggctgcagtgagctgagatcacactactacactccagcctaactccatctcaaagaaagaaagaaagagagaaagagagaaagggaaagagagagagagaragaaagaraaacagagagaaagaaagaaagaggaagagaaggaaagagagaaagggagaaagagrragagagagagaaagagagaaagaaagaaagagagaaaaagaaaagaaaagaaagaaagagggtcttaccatgttgcccagactggtctcgaattcctgggctcaactggtcttcccacctcatcctctcaatgtgctggcatkactggtgtgaaccactgtgcccggccaagcctttctaactaaatgctaattgagctccttctgtatgccactggggcactgtgtatttctctctctgtgtctgtgggagcagggaaggggaggctcaaaggtgagagcacccccacccccraggatctcgtgccctgggccccctgcgcacagagccttggcccagcccacccctcacccacaggatggtgcaggagcagtgctgccacagccagctggaggagctgcactgtgccacgggcatcagcctggccaacgagcaggaccgctgtgccacgccccacggtgacaacgccagcctggaggccacrtttgtgaaggtgagagccaaagaccatgtggggtcgctgcccgtccccactagtcggcagayccaggccctcccagccaagyggcactgtctgtcagcgctccctgcctcaggccacctttctttgtgagcagctgggggttcctgggccaggagggaggtggaaaaccccactgtttctccccctccactgtagccgtaaaccccrgaggacacctggggccgagtctcccacgaggccggggggtgaagtgagctggccttgccctgagaaccgcctgtctccaggcattgggcagatgcagaagtcaaagcaggsctcctcctgggcttcyagaatcttcttctcaattcagggtcggcaccctcaccctacccaggaggctctcaggcttctctacccacagactcgtcagggtccagaggtaaaaatgggccctcactaagacctctgataagatctgacctctataacgaccctaaaagaggaaactgaggttcagagaggcccagcytccaaaatggcctctctgcagtcctgtcagggacccagacgggatcctgccctgaaggtaagctgtgaataaatggcatagtcctcttccctgagtgctsctaggaccctacgtgctagcaggtcactcaggaccgctatggccgtggaagggctgtgtctttgcaagaggtggaaaggtgcytgacagcattgcctacaggcagtaaacccaaggtgtccaggccatccctcccttaccacccagccagcaaggaaaacaagcccggccaggaggaacttgggcctggaggagctcgggtttggaagctgggcttctgttggaggtgccagatgacgaaaatgcattccctggaagaagcttcccgttcctwkttaggaaggtgatggaataattttaagaarcaagaatctgaatgaagtctggattccaggagagggtgtgggagctcctttgtggggattctccacatagattgggctgtggagggactccgtgtggaggagttgggggtcccgagtcccctgcccaccttggcctgtgtgggctttcacagggcagggctctggcccaggagagagctgggtggggtgatggtgggggtgcctgggaaccaggactttgggcgtttcatgactgcccccgcaccctcccacccaacacccaatgcagggctgggccttgcagatgccgtcggtccggcacacagctgtgcccatgtccccagacttgagaggtgtggaaaaagcacagaacattctagcaggagtgggaacagatckctctggcagatgagcgacttgtgtttccaggaaggattactcacaccccaaaagatggatgaggtractgatgctccctacactttctggcagcggagggcgtagaataagcagcctggaagacccatcagtgccacataactgaggcaaagctacacctcctggctcctgctggggactgtttagaaagttctgtgctcctcttaggataaccacttaataaagactgaagsagggcttttcgtgtgtcagggcaaatgttgcttctgggactcaggtgtgaggccacagggacttggaagtaactattgggacctgggcccaggtggcagacagccaccctgtcctttgaccttgcttgatgactygtcttgaagttcytgtgctttcaaatgcacggtgcaattcctgctgccagaacccctctaactcaaaaacggagaggcagcatgcatgtgtgtcatttttccgggcatggtagagaaatctcagaccatgcaaaaggaacagaactttggagctggtgcatggtgctataagaagctccctcttcctggatgtgtgcgagcagagccrggtggtctctgggyggggcagggatgttgaggggtgcaattgcatgttggggtggggaggggaggtggatgccaggccctttaagcttcctttcaaaactgggacctagatgatttggagtagggggatggccttgctttgctatttgttgctgacatttagaagtggtatctaagccagacttgagtcatcactctacaggttstgtggacagggggctcagagaggcctcccctgaggcctctcgtggaccccgctgggctgtctgcccgctcctccatctgggatctccacctgtgtttgcagaggtgctgccattgctgtctgctggggagggcggcccaggcccagggccagagctgcgagtacagcctcatggttggctaccagtgtggacaggtcttccrggcatgctgtgtcaagagccaggagaccggagatttggatgtcgggggcctccaagaaacgggtaamtttcccccttccttccctaatgagcagtgtattaaggttctccgggatgtgtatatagagcgagagtggagagagagagattttaaggacttggctcatgtgatcgtgggggctggcaagtccaaaatctgcagggcaggccttcaggctggagccccagggaaggaggggcattgcagctggagttcaaaggcagtgtgytggcagaacgccgccttycccggggaggccagtcttttttctctgaargccttctgctgattgagtgaggcccacccayggtatgaagatgatctgcttttctcagcatcaacagacttacatgttaatctctttttttttttgagacagaatctctctctgtcacccaggctggagtgcagtgcagtggtgtgatcttggctcacggcaacctccgcctcccgggttcaagtgattcttgtgcctcagcctcccgagtagctgggattacaggtgtacactaccacacctggctaatttttgtatttttagtagggrtggggtttcaccatgttggccaggctgatctggaactcctgacctcaggtaatccacctgcctcagcttcccaaagtgctaggattacaggtgtgagccatcgtgcctggccaatattaatctctaaaatatagcttcacagcaacatccaggctagtgtttgactaaatatttgagtaccataccccagcccaattgacacttacgatgaaccattacaggtaacacgtgcatccgtgtcaccattgccttaactcagcacggactractccggttgtcggagccattcatgtttgtgaccttatctgaaagccgctgtcctggagtgacgctgagtgcttggagtctgggatcggacaaatctgtgctcccatccgggtcctaatgtgtaccttggtcccctcatctgggaagtggggatagttgcagtcctacttcatcaggtgctgggaggatggagtgcgagattgggtgtcaagggttgggtagagcacctggccccataaatgtctgccctcaccatctgcccttgwcccttcagctgcccggggcagcatgggtggctggccttgctcycacttcttgggtgasggtctgatrctsaagatcgcacrgccgacacgtggaggagggagagcctggccttccacctcctggccagtgccctctccatctggagctgacgatgtatgggcgagcagctgggggccatcgctggctaatagctggctatgctctgtcaaatcatagacwcttactcagcaaaggggcatgtgaccccaagagcagcttcaagagcgctctcagctgtgtgcccccccgttctgtgtcctcgccctgcatttctgtgtggttcagttacagggttcaggagactttgtggctgtccagtagcctcttacacttaggccacggtttcttgtgctgtaacagaattaacctggaagaaggcaggactccgcctgggccaagcttgctgtgtagttttcggcctgttccctcctctctctgagctttgyccccactctcytaaaaaataaaagaggtgtgagctgggcacggtggctcacgcctgtaatcccagcactttgggaggccgaggcaggcggatcacstgaggtcaggagttcgagactagcctggccaacatggggamaccctgtctctactaaaaatacaaaaattagctgggcrtggtggcgggcgcctgtaatcccagctacttgggaggctgaggcagggagaatcgcttgaaccygggaggcggaggttgcagtgagccgagatggcgccattgcattccagcctgggtgacagaacgagactcagtctcaaaaaaaataataaaataaataaagaggtggggaggtgccggaaggggcgaaagggaagaaccctcagacctgtagtctctaagtcaaggtratggctgtagggtcctgggtgacacggaasctttcacttcttgttcttaggttttcaagtccaggctgtagggcccctggtcacagaggacccgggtcacccgggactcatctttcacttattgttcttagtttttcaagtccagggccccatggatgccactgagatgatttcagatgttacagtcatcaagagggattggggccgcattctgcctcattccttggcttttgaaatcagagacgacattttcactttaaacaaacccaaaccattcctgctggtggaggatttctcctgcatctcgggggtggattttcactgatttatgtctgcagcgtgagcagtctctgggcttttctgcagctccagatgttagatgttttatctctccgtcttttatctgcttcagtccttgccccagactatcctcgcatgctccctcctctgggagggcttcctgtcttcacagccgcaccttcctcccactgctaccagtgccatggacccactgtatgtktcctgggggccatgcagaaggtccccagaccagtgctggcctgcgacaaataagtacagaaatggagaataacccttttcaaacacataatagcatttgatagaatcaatcaggagactcaagtttttactgcgtgcattgctttagacttggagggcgtgtgttggytgttagcaaggctgtgactgcatttgctgagatggtcaagtaatttggactatgggaayatcacccagcatgaagtcaatgattacaggcctttgtgtctgtggtctttctgttataactgatcttttttttttgaaacggagtctcgctcttgttgcccaggctggagtgcaatggtgtgatcttgactcactgcawcctccgactcctgagttcaagcgattatcctgcctcaacttcctgartacctgagattacaggygcatgccrctacacctggctaatttttgtatttttagtagaracagcatttcaccgtgttggccaggatggtcttgaactcctgacctcaggtgatccgcctgcctcggcctcccaaagtgctgggattacaggtgcccgccaccacgcctggcctataattgatcagatatcaattatacattttcaagtgtaattctagcttaaagaggataaagttaatacttagctgtttatataagatgttcaaatgggcaytactgcctgatagtgacaagaagagagaatgttgggagtttcttttaagataagatgggtgtttggrtaaatgtctgacttggtctttttcccccttagataagatcattgaggttgaggaggaacaagaggacccatatctgaatgaccgctgccgaggtgagactcgggcgtstcccatcagttggtatttaaacaaaccccaaggggccagcaaggtggctcaggcctgtaatcctagtactttgggaagccaaggcaggaggattccttgagcccaggaggttgtggctgcagtgagctatgactgcacctttgcactctagcctgggcaacagagctggaccccgtctcaaaaacaaaaaaacaaacaaacaaaaagcaaaaccaaggaatctcggtrctgatctcactggamgttrgaatccaggttttgctttggtttaccctgcaaagtaccctttggctgggagccagccatgagccacttccaccctgaggagtcstggactcccagctcctccttccctttccccttccagatctagggctggctggggaggggaagggtgggcttaccaaggaggggccctggtgaggccctgctggggagggtggcccaggcccagggccagagctggtgtggaaagcctgcacgttaccgagcccccaggccttgtgaaggtgacagaggcctccctcaggctctcaggggagaggagggggctcagcgttccctgcctttgtgcccctggagccccagccacggttctgtcaccattggtgatattcatttgcctcmcagggagatgtctgcacatttaactaagggcctcgcaggyttgtttttcatatgataaaactgcttttctttcatggaacattctggcatgtctagacctgcagatctgcctcacaagctctttcmgtggttccccctgtggttagggtgttaattaggggccagtttaatycttaaatgatgcagtcagtgtacagtgacagttggtccaggggcgckgtccaggggcctggtggagggaggaagggagtgacctagagccccagcaagcctcagggctatgggaggagctttctgggraggggagagctggtctgcaaggaggaggtgggattagctgggaaaataaccctgaaayggtcctcakggagacctgaagccttgtaaagggcacggacccactgtagcagggtactgggaggcagtgggctggggaaggaggtggggttacagggccagagagaggggccctagaarcaggcaggctggcagcagttagaagtgtatctcgtagaatctttccctggttgaggcttatcctgatgagatttgcactctgagcatcactctggccaccctgtaggaagaacaggttgtggggtgcttctgggctatgcagaaagaccaggtaggaggctgtggccacagccaggtgggcagctgcaggaactgaggccatggtagtgggcttggagcagtgggacagctcgagagttcagtgaggagcaggtacatgaggcctagttggggcctggccttccacgtggagcccacacccccatgtctgtgaccggcagtgagctcttctctgcytygccccttccaggtccaccccagcctacaaagggcaccctgcacaccacctgattttccagacggggaggttgggacctgaagcmgcagsccctgsggggtgtccagagccagagcctgggggtctcccagtagggcagcaggtgggctccagccaggtcagcctgccttcctgggttcrtctgcccagagggcgttttctatgacccagcctgaacggagctagaaaccaggcggtgcctgggtgcgtccatccctggctcatgcacgctgtgcttccaggaggcgggccctgcaagcagcagtgccgagacacgggtgacgaggtggtctgctcctgcttcgtgggctaccagctgctgtctgatggtgtctcctgtgaaggtaatgtccctatcccaggtgccagcaggactggcyggtcactgtgcttgggagctctgtgctggaggactgaccagggcctgccttctacaacccagaccccattcaggggtggagagcagcccaggacgcgctttctcgtgttygctggagttygcagcgcagaggcccctgccgagacttccctccaagacaatataagcactggggttgggaaagaggatggagttggggtctaaccaggttccggatccaggatctgctgagtggccttgggcacatccttcagcctctcctggccccygcgtctgtgagatgggggagatggagaagatgctgcccctccrtggggttcttgaggaccacataactacagtctcagaaaaagcagtagrtatgaacgttagcaggggagagaaatcactgctttcgactccgtgcagtccacagcccggatgtgcacatggtggacctgagctcagtttgcgagggtgcagggaagcacttccaccgtggctttggcacattccttyctaggatgtattaggatgggtcgttcttgctggtcayccccgcactgcctcggtctctcctagatgtcaatgaatgcatcacgggcagccacagctgccggcttggagaatcctgcatcaacacagtgggctctttccgctgccagcgggacagcagctgcgggactggctatgagctcacagaggacaatagctgcaaaggtacagcatgcgctccgagtctgcaaacctggtcttccaggcgtagatacggcgcggtgggaagggcagctctggggtctgggctccygcagtcctgcgccctctgtggctgcctgggcgactgcctgctcatctgcaggagggaggtggttatacccaccagggtgtctggacaggtgggatggaaggtgaaagtgcttgccaataatgttcagaacattgaaaaagttgacagtagtgcmccggtgccagctagttcagctgttaggaaagatttacgttcttatggtgcagagtaaacgatggcagatttgggtttytaaaaaggctcagtgcatgactatttaaaatcaagaccagggatgaatttcaggttctcacatgtactttytmcaaaaaaaaaaaaaaaaaaaaaaaaaagcaaaaacaaaaatcccacaactgtttttgcacaacagctgccttccatccaaatccaggcttccttgaagttcaaagcatatccccttccactgcataaacacatggcatttctggctgccagcctttccccgccaagccttaggtgttatttggcagatggggaggctctgatgaggatcgtttagaacacagttttgcagagggtttcaagcctttcagaaggacaaatccacttgtgtaaaaatgtcactcactgtatcatgagagtgacttcaaagcatggcacaccccttctgacatctgagggccacagagcaaattctgtcctccccacccccrcacaccagctgggtggtttggacccctagagcccagtggcyragccagctgagtatacacatttgaccatttgacagccatgaacttcaagggaagggcagcccatcacatcccatcatgactgtaacccttgttaatatctggattattgtgaagacttcagaatggatatgtttatagagactgtgtttgttgccactaagataattgctttatgatctaaactaaacatacacttagcctgaatgaatactaatatatatatacctgccaggaaaatgccagggtgatttattataacagacagtttgcctcataagagccttgggaaaaaaagtcagctttttaagtctttagcaactggagcacgatttggctcagtgaagtcttttttgtgtatgatttctctattagaatgttttgggttatagtctgagtaaygcgcattagaaaaaagctttcttgtgattttaaagtgttgtaagatgcttctggcaggactcttgctaacaatttcctttttttatgatgtaccagatattgacgagtgtgagagtggtattcataactgcctccccgattttatctgtcagaatactctgggatccttccgctgccgacccaagctacagtgcaagagtggctttatacaagatgctctaggcaactgtattggtaagaggtgtgccgccaggattagcgggttattccaggaggggycagcgacctagccttggggcaggcctctagaatctgcggggccgcatggtatacagaacaggggttggcaaactttttgtgtaaagggctggacagcaaatagagcaaatactttagccgttgtgggccatatggtctctgtcataatagtcaactctgctgttatagtctaaagcggccaagggccatctgtaaacaaatgggtgtggctgtgttccaataaaactttatttacaaaaataggcagtaggctggatttggcccaaggaccacagtttgctgatctgggtttagattaaagagcttgggttttggagttagagtgacccaagaaaattacttctgagctttaattttttcctctataaaatgggagtaatcataatacctggcttagagacttgaggccaggattaggcgagtacttgckaagtactggtacacaggaagcactcggtgagtggtgattccctgccacaggcatttagcctattaaaaaattattttaaaaaatacttggctgggcacagtgggtcacgcctgtaatcctagcactttgggaggccaaggcaggaggattgcttgagcccaggtttttgaggccagcctgggcaatatagcgagaccccatcactacaaaaaattagctgggtgtagtggcgcatgcctacagtcccagctacttgggaggctgaggtgggaggatcccttgagcagggaggtcgaggctgcagtgagctgtgatcrtgctactgcactccagtctgggcaacagagcaagaccctgtctcaaaaataaaataaaatataaaaataaaaaacagtctgtgttagtatttgaattcatagagacagaaagtagaatggaaggtgccggggctgggcagggtgggggatggggagtgagtgtttcctgggcgcagagtttcagtttgagaagatgaaaaagttctggagatggatgggggtgatggtggcacgacagtgtgaatgcagtaatgcccctgaaccgtctayttaaaatggttacsatggcagattttgtgttacataaaatttgtagttcacatgtagttcaccacaatgagaaaagaaactctggccaggcacggtggctcacacttgtaatcccagcactttgggaggccgaggagggtggatcacctgaggtcaggagtttgagaccagcctgaccaatatagtgaaaccccatctctactaaaaatacaaaaattakctgggcgtagtgatgggcgcctgtaatcccagctgcttakgaggctgaggcagcagaatcgcttgagcctgggaggcagaggttgcagtgagctgagatcacgccactgtactccagcctgggtgacagagtgagactccatctcaaaaaagaaaaaaaaaaagaaattgctgatatcagagaaatactaatatgaaaagagagaatcccatgtgaacttagtatgaatttaggaggcctgggcaagaccgctcacgctagaggagctgtgtggggtgcggccggggagctggccggcctgggttactggttctggaaagacaggaggtgagtcctgctttccccagccgttgtcaggttaactgcctggctaggccgctgcagtcagcgcttaagtcctgatccaccggctctccctcggcctctgcttggcagacgcccctgggtcctgcctttgaggtcagagagactttttaggagaagaggtgaggaatccgagcyacagatcacactagtcagaacctccccacctggggtggccccatcacctctcccctgccatgagcaagggggtatacatttccatcttgcttcgatttcaacttttccttagcgaaatctgtattgatcatttatttgaaatagtggtttggagagagagctcttcccccactgcattatttttaaccactgagatatttaaagataagtggatgtggccgggcacagtgactcacgcctgtaattctggtactttgggaggccaaggcgggtggatcacttgaggtcaggagttcgagaccagcctgaccaatatggtgaaaccccgtctctactaaaaatacaaaaattagccgggtgtggtggtgggcaccttgtaatcccagctactcaagatgctgaggcaggagaatcgcttgaacccaggaggtggaggttgtagtgagccaagatcgtgccactgcactccagcctggacaacagagcaagactctgtgtcaaaaaaaaaaaaaagataaaaagacaagtggaacagtgagcccttaggacaggggcctcgtctgaaacccgccccagccttcctctgttacagcttccctgtcatcccctgggggagacttctgagctggggcgctgtggctcagctgccagttggcccctcgccagtcccttgccagcagggaggggtggttttyrctcagcgcagggggtggtgagcagggaagccatgggctctccgggaccagcggggaggatagtcctgctcagacttgcagcctgctcaaaggggggtccggaggaggctggcgtcgactgaggatggaaaccctgactcatggcaaaatcagccccgatttccacaaagaggcaatgtttgcaagtctcaacctagccctgactttcctctctacagggtgcagcactgtgtatgggctgaggctcgggagccgtccccttactgtccttccaggactggcaagcaggctgtgggctgaaggccagcctggcggcactgagctgttccgtgccatctccctgggtcctcagtgacagcatcgaaagccaaatgttcagctccctcagggtccccttagcttgggatgctgggatgaggatggggttccccttttcatgtgctctcaatccttgcaatcaagctcaggaatcattgttttaaaagatctctatttatttcaaaaattatgtatgtcttgacttataaatcagcaaacaaaacctaagtgtaggaagtaaacgctcctcccctggccaatcctgcccgcctcttggcagggtccatgagcccttctgggctctgctcccttgagactttttgtttttttatgaaaatgggatcagactgttctgccacttgcttttccccccsmcttgacagggtatttagaaatcatttcatgkcagcacctttatgttatctttttaaaaatgactgcatcagcagaaatacgtctttctaaggagaaaatacatcaagatagaaggtagtttcaggccgtctgggagagggctgaaaaggttctatgtcaggtcctggtcccccagcacgcaccctgggtcctctgctcccacacctctgcccatggtacccgctccctcacccaggaacagcatggtccgtggtgggaagcgttgatttccttgtgtagccagaatccatcttcctggagctcctagaaccatcctggggccccaagagcccatccgagcctcctgcctgtagcagaagagctcttcctgcagagctagtacaagggatgggtcagggtcccagaaagtggaggtctctgcccctatcatgcatggagaattttctagaaccttaaggttgggtcaccgagggctttgagaccagcatggctttgtcgggttttctttgctcttttcttcaaattccctcctcctgctgctgtattcctttctccttctcctcctcctcttccccctcccatcctccccctccctyctcctcttcccctccmcctcccctcccacttccctcctccccctccttcccttccccttctctccctccccgcctccccctttccctccttcttttcttcttttttttttttttttgagacagtctcactgtcacccaggctggagtgcagtggtgcaatcttggctcactgcaacctccaccctgctgggttcaagcagttctcctgtctcagcctcccaagtagctgggattacaggtgcccacaaccatgcctggctaatttttgtattttcagtagagatggggttttgccgtgttggccaggttggtctcgagctcttgayctcaggtgatccacccctcggcttcccaaagtgctgggattgcaggcgtgagccaccacgcccagcctctkcctttcttcttgagtggggaggaaggaatgggccagggcttcccacgtgccctggctgaccttgcctggggatgtcggcaggtcctggggcaggaaggggttccactgaatctaggaagcactgggtgaagccaagtgaacggggaccttggtagcttgggcttttcccatgtgaatccctgagagggagagatcgggtgccctgttcccaaactcaccctatgctttacattgatttgctgtctgtttattcattcccattcattcattcattgatagccaggtcttacccctgtggagtgcacgatgttctgagggacactgttgttctgtggaacagagtttggggaatctagtctgagtgaggaacctgcagcgccagtgggaaggcagccaccgctctgctaaacgctgcatttattcgtgttacagggcaggggccacccagctgtttctctaaagggctagatggtaactaacaacttcagtctctgtggcaaccactcaactctgccttttgcagtgtaaaagcacccctgagcaatgcataacagagtgggcctggttgcacgctaataaaactttatttacaaaagcaggtgtaagccgggtttgaaccaagggccatcatttgctggccactgatttaagggagctggaaagcaggagaccctgattctagacctaggccctggttggcccctgacttcarccatgarcccagagtcattcagtctcyggaccttggtttcctgtttataaagtgcaggcagtaatgatagtgatacckgcctcacctcacttgcaggctggctgtggtgctcgagagcggtcatggatgtaaaagcttttgtaaactgtaaattgctgcacggtcagygygaagggctgactcatttgactgaggagggtggacttggctggcagggagaggggtrcagctgtcctcctttctgacttacgctcargggtcttccaccatcactccctctctttgttcccccataccagatgctttgtaagtgtctgagcaaggttctccaaggtgatgtttagatgcttaggtccttttccactccctctatcaggaagtgcaatctgtgtattcttcctccgaatttgagcagaagragggtatccctgtktagcatggccctcctggaccattcatgggttcacacttgctcattgtatgtcatcaaaggtaaatgccccacggtccccatgtcagagatgtgtccactcaaggaaggagactgcygtgcagtgagctcagggagccatggcacctcccgggtgggcctggctcagcataggccctgtgaagcccagtcatcggaggggcctagagccttgctgggagtcagagttgctggcaccacgtggacagtcacctgtctccttaataccgtgcccagtgtgtggagtagatgaatgcaggagaagccaggcaggcaggtcccgatttggcgcagcgaacgatggaggtgctggagatttagggacaggaagaagggccagagaggtggtgtttgaggcggtatgcagtgataaaatttgggagccagctgggaggyggctgtgtggtccagagtgagggggttgagcccctccatttgtggttttgcaaagaggtgggaaggggagtttctttggagatccagtttttgggttctggracaccctccaggtttaaccacatggtctctgtcttttcccgctgtagatatcaatgagtgtttgagtatcagtgccccgtgccctatygggcatacatgcatcaacacagagggctcctacacgtgccagaagaacgtgcccaactgtggccgtggctaccatctcaacgaggagggaacgcgctgtgttggttggtattaagaaaacaaatctgaaatccactttcctgtctgcttccagcatgcaccctgccttctctggaagcagaaagttgatccccaaagcaaagccatttctatcagcccatccatcccaytgtcarttcccaagcatggggcttcattgtcttgcctggactggtgcaccagcccgtctactgcctcagccttgtctggcttgtcctgagcccaaagctctcgcaccccaccctgtttacagttccatcagctccccgttggtgacaaaggatggatgcctctgcttacagtccagtcccccagagctggcccaactccacaaaccttgtaattcaggcaatgtgggtctgccactccccacacaagcactgtcctttcctctctgtgtgggtgtttgctctcacgtcattccctctgcccacctgctcctacgttcctttggatccagggcacccagcctgcctagatcccgccagggaaggagccttcctcgcataacccccaggacacttcttcagtgtctccctgggttcctgggcacttcctaccttaatgagagtcattgctggcctgccagccaggtagggctgcctctgggtcagctatcttcccagtccagggcccggcactcagtaggtgctctgtgaagtcgtgttgaaatggaatgcctgtttccatgtccatgtgttcctttcttgctttcctttctgatcmtcttggggggaaaaaacccaaactaaaggttttcatcatggctttctttctcctttgcaagatgtggacgagtgcgcgccacctgctgagccctgtgggaagggacatcgctgcrtgaactctcccggcagtttccgctgcgaatgcaagacgggttactattttgacggcatcagcaggatgtgtgtcggtgcgtggggggccccgcaggcctcgggggaacccagccacgtggcaccagggacacatttmtgtggcacctcgagtgatgtggtctgatcctcatctcagataatcccaagtgcaggcagaccctgagagaagatcytgagtcaggagaccccattctagccccagctmtgctrctgcccagccaggcggccactggcaccacccccctgtgtgtgagcctgctccccatctgtggaaaggggttctgcttgacccaggacctccaagtgctgatgagccaggtctacacatgtgggcagcatcagcgatttcctggagattcaccgctgagctgtagatccccaggagctagagatgtgtgcctttagcccagggcagcgaggggaaaagttgaccaggagtggggtcaggtcttgtcyagccagtgcctgctgtcaccaaacctaggtgctcagggaagcctggcagctgccaaccactcccccaaagtgggcactttgctagatcctggcagaccctccttgtgggtcctggggaggaggactggcaggagggcacaagttcagatgtgctgccgcagaaggagcacgaggctcgcccaccaggcaggcacagcgcggcagtcccggctctcccactgacttcccgcatgctcgggacaagtcactttgcattccttgyctgagaaatgaggctggaggccaggcgcgatggctcatgcctgtaatcccagcactttgggaggctaaggcaggtgaatcacttgaggtcaggagtttgagaccagcctggccaacatgacgaaacctcatctctacaaaaaatacaaaaattagccgggcgtggtggcacwtgcctgtaatccctgttacttgggaggctgaggcaggagaatcacttgaactgggaggcggaggttgcagtgagctgagatcatgccactgcaatccagcctaggagacagagcgagactccatctcaaagatgaaggaaaaaaaagaaatgaggctggaggaggtggaggacaaaggacatgagctggccttactaggagggtggagtgtggtgccactgtgttggacattgccctgagtcagcccacccctcactttcagatgtcaacgagtgccagcgctaccccgggcgcctgtgtggccacaagtgcgagaacacgctgggctcctacctctgcagctgttccgtgggcttccggctctctgtggatggcaggtcatgtgaaggtgaggctggggccccgtccactcacctcccccaggtcaccttcctcctggggaagccacccttctgcagaccggtttgcagcagatccgcgatggtttccctgttaaatgacatgttagcaggggaagtgcctgtaaaatattgttcatcagagaggactgcccgcctgcccacccgatttctcctgatgacatccaccctccgaggccgtgtcggggttcataggctgcggcagaggccatgcgggatgtggctaggattatggggcttggagcatgacacccacgagtcacagggccttggttatgcccgacctctccctgcctccgtgtcctccccggggagaggggttgatgtgtgaaacagcagcgaaaactggacacttgttttgcacaaagacagtgtgtgggttttaatcagatgctgcctaggggagacaggcctctgtgtccattgatctcaagtcacccaaacaaaaggagggaggctttgtaaatgacgagctgtgagaggaagtactgaggcctttagggcgtgggtcactgtgcacctgcctctaacttctttttttttttttgagacggagtctcgctctgtcacccaggctggagtgcaatgctacgatctcggctcactgcaacctccgcctcccgggttcaagcgattcccctgcctcagcctcccgaatagctgggattacaggtgcacaccaccatgcccagctaatttttgtatttttagtagagatgaggtttcmccatgttggccaggctggtcttgaactcctgacctcagatgatccgcccacctcggcctcccaaagtgctggcattacaggcgtgagccaccgcgcccggcctgcctctaacttcgtgttggagttaggctttccccacccgcagagacagggagaagcaccctggccttccggatgacgacattccccaggcatgtccccagcccttgagaaagacactccttggttgcacatctcaaagggacagagaaaccgtttacatttgcaagtttttctaaagtagatgcttctaaggaacatggaggtcagcgcctgtagtcaggtttgggctggaaccaagagaaaattcttttggcagcattgatctttctcagacaggcatgtcaagggggctgggtctacatcctggatacctggtcttgggccaatggcagccacgctgaagttgggtcaggtctcttggtatgtgggggttggacagagttgttcctgccaacagtcttgtggttctcagataacaccaacctcctgggctgatgggaaggtcacatgaactgcatgtcagcccagggcctggcacatactaggtgcttggcagatgtcgtgtcttgtatmcggattaggttctgagctgagcagacactgagagctttggatggccctccacaatcgtccacattgccgatgacaccctgtttggtgccgtgcactggctcacaggacrgcttctgcagcctgactcaaacatggcaggtcctaacattttgccrtgagaattttccttcctgatgagatggtcgcaggggttggatatgccacagtgagctgtggtgtgcatgattctcaaatcggaggacggacggtgtgaggggtcctgggcttagttcacaagaacgtgtatggacaaggaacaagattcacgagttgagtctctcaggcttgtgttcaaacctgacttctgccatttccatggccttgaagaagtaactcagtctttcctgggccatggtgtcctcatctgtaaaacgggcatagtaggaccaaccccatagggggttgtgaggatgaaacgagattaagcatgtgaagagcttatcacagggccaagcacaggatgaagagctggcggtgtggaggctgctggctttattattatttagtagaagtagtgggattcctggcttgtgcttcctctagtcattcataaattgctgaaaagtcggcattcatatccacattagtggacaatattgtggatatagaaccagagcctggccarccttgctatgtgaccttactaaccatttgttarggtcctgccccgggtgtgtagcaagaactcggtcctgcactggggagtgtctctagcgggggatgagagaccacactggacaggtggaggccaggcctggtgtgtgggggccacagagatgaaacacggggtggaaggctattggacgttctgtgacagccacatagtatagatttaaggcttttccagccacaatctctgttgcaaccgctgaactctgctgtggtagcagagaagtggccagaggaccatggtaaaagaatgagtgtggcagggcacagtggctcacacctgtaatcccagcactttgggaggctgaggcaggtggatyacttgaggtcaggagttcgagaccagtatggccaacatcgtgaaaccctgtgtctactaaaaatacaaaaattagccgggcatggtggtgcacacctgtaatcccccagctactcaggaggctgaggcaggagaactgcttgaattcatgtccacatttagtggacaatakcctcccggaggtggagattgcagtgagctgagattgakctacttgtactccagcctgggcgacagacaaagactttgtctcaaaaaaaaaaagagtgaatgtggctgtattctttattttattgttattattattttgagacggagtctcgctctgtcgcccaggctggagtgcagtggtgtgatcttggctcactgcaacctctgcctccttgttcaagcaattctcctgcttcagcctcccgagaagttgtgactacaggtgcgtgccaccatgcctggctaattcttgtatttttagtagagatgggtttcatcatgctggccaggctggtctcgaacccctgacctcgtgatccgcccacctcggcctcccgaagtgctggaattacaggcrtgagccaccatgccttgccgggctgtgttctaataaaactttatttataaaaacaagtgttgggacaaatttggcccatagactatgatttgctgacctctgctttaggtaaaggggacagttgagcagtagttcagagttgctgagtggcccagtgagttytgtgcattggagtatgaggagtactggcgtatgggctgggtggccgaggacttccttgtgtgccgtcatctgtttaggatgccatcttggaggtgaagtggagagcacaggatcagatttccatttgagaactagaatggactctggcagccaggtcggggcagacttccaggggccaaggctggaggckatcgctgccatcctggcaggagaagttgtggtcgaagcaggcaggagcagggatggagggtccggagccaccagcgatgacgcctctccctcggccacaccccccgggacctctgtctctccgagtgtgttaacctgagggaggtggagaggagattttctgttcrctgaccctgagggctactgtggaggcagggacgtatgatgctctgagcggtgaccctcgttttgtatttcagacatcaatgagtgcagcagcagcccctgtagccaggagtgtgccaacgtytacggctcctaccagtgttactgccggcgaggctaccagctcagcgatgtggatggagtcacctgtgaaggtgcggacrcccctgcctgctgmgggggaaagcaccccctggtcttgccatgacacagcagcacggcctctgactttcaaaatccacagggaagagcctgctgggatttcttcacctgrcaaaccttccatgtccacccttggaggcaagcgggtggtttgctgttttccctccaactgaggtttttttttttttttttttttttttttgagacacggtcttgctctgttgcccaggctggagtgatatggtgcaatcactgctcactgcagcctcagcttcccaggctcaagtgatcctcccacctcagcctcccaagtagttgggaccataggtgtataccaccatgcctggctaattttttatttttaaaaaattaragacggggccttgctgtgttgcccaggctggtctcgaactccgtggctcaagtgatcctcttgcttcagcctcccaaattgctgggattacaggcatgagccaccgtgcctggcccccaactgaaattctaatatacttttcccatccttaagcgtgagggtgggaaggcagcaaaccactcytgacttgttctttaataaatgtgcacggcrgtaattacaacatgcactgggaccttgggccgcatatctcaggtcttggtggtggtgcatggctgagaggtaaggagggggctcagggaccacctatatccctgactcagagctctaactcttcatctgtaacatgatgattaacttcagcctcaccagatcattggaggattaaaytagatgacagcaattacaggcaattaagggcaattacgatgattaccattttcatgtaaggtgtgtgtgtattttgtttgcttgtttgtttttgagacagagacagctctgtcacccaggttggagggcagtggtacaaacacggctcactgcagcctccatctcctgggatctagcaattctcccacctctgcctccttgagtagctgggcccacaggcatgcaccagtatgcctgactaacttttttgattttttgtagacacagggtctcactttgttgccgaggctggtctcgaactcctgggctcaagtaaycctcctgcctcagcctcccatgcctgggattccaggcatgagccagtgcacccagctgaggtgtgtttcttattattgaactgtggtccatatttccccctgcccgccacatgcatacttcacaccatgaacttgctgtgtgaccctaggctagtcccatcgcctctctgagcacgatggtctctgaggcttcctgtgttcagcttgtcctgtgctgctgccctcccgggccccagtgcagcccccagggmgatgtagcatggccagcagccatggccaggtgccaggacactgaggctgaggtgggctttgccgttgcagacatcgacgagtgcgccctgcccaccgggggccacatctgctcctaccgctgcatcaacatccctggaagcttccagtgcagctscccctcgtctggctacaggctggcccccaatggccgcaactgccaaggtgagcaggagggatgccctggggtccctcacgctctgcttggggccctgcaatgtcgtggggctgaggctgggctcgggggctgtgcttccccaacccaagggccacagcacagatggaatgcattcaggaaaaggaggcccaccccatccaaggggtgtcctggggtctgcagcaccctggtctcctacacccaggccccagcacacttgtcctctggattgtctgagcctgtggcggctgcatccggcaggaacacttcagccctcctcccctcccctcagcagccccgtaaaggctggaacagaggcctttaggaagatgccmgccagggaggaagcagtccaggccaggggatggcgtggcctggtgtgggatggcccagggatactcatggctatgggtcagctccagcatcggctaagtaatggtggccaatggcattggttctgcattcagcccccttttctacgaatgctctagggggcagtgtgtgtcccccagagccatctgataaccatccattcaatcactgacagcgggtgctgagtagatgtttgtgagcgcgtgatcctcagtgtacacactgcgcccagaagctgagtcatggaggtggggctgtccagccagttcctcgggagccccacacaggactgtggatcctggggctctggaagccccctgggtcccacagatgtagcttctggtcatgaggaaggtgactttgatgaaaggcaggcaggagctgcggtgtttcctgggaggccccctccgcttgccctgggctctggatggaaggctggttgtgtctgcatttctgacggagcaaatgacttttctcctggccaggctccctcaccacagcctggggtcccgcccagactcagcataaacacattcctgagccgggcctttgaggctggggagtgttgtttttgccaccratgctcaggcatttggcacctcttaatggatgtctcccagggttggtgacagcccctgagccccactgtttggctgctccagagtctatgggagttgggctgctcccccatctccaggggcctctcagtgtggtgccccaggccccatcccaggagtcccagacctggtggttccagtccaccctgaacagccaccaaccccaacacacaggcaagacgtatgatccctcgaaggctgtttttctcattgttgtgtggagctagcagctcctgcccttttctcctaagaggttgagtcacacctagggtaagggtgctgagcctcgggagccacagagaggctctggttagttagtgtatggactctgatgccagcctgcccgggttcaaagctcagctctgacatttataaaatgtgtgacctcaggcaggtctcttaagctctgtgagctcctcataaaatgaggatcataacagtatctgcctcattgagttcttaggaggattcagtgacttatccttgcgaggtactcccaggacccatcatgtagtgtttacttttaccatcgtcacgctccctccagggattgcgaatgataagttaacactctataaatgtaaataccctataaatgtaagaactggcacaggacgctgctctgaagatcagccagtggagggcagggatggcctgatcgccacccctaaccctagttgatgggaggcctgggctcctccgtctccagatgggtatggctcctgcagcctctgccttcactgtgctgctgtggggtctcttgcagwcattgatgagtgtgtgactggcatccacaactgctccatcaacgagacctgcttcaacatccagggcggcttccgctgcctggccttcgagtgccctgagaactaccgccgctccgcagccacgtaagtcccttggaccatgccatcgtcgtctgtctgtgttggccttcctggtgacccagttcccgggtgggtgggttatcaggctgtgacctcggtgtcctcccatgagggactcaggscactcaaagatcacctgatccctggccctcaagcccctaaatgctagtgacactggtctcggaaagtcaagggggtaactgcaaatgagtctggggtctatagtcatgttttcaggccaaggctgtgcacagaaccaggagaaaccacagccctcttttttcctagggtggaagccttgggcaagctctctgggcctcagtttcctcatctgtaacatgcagatgtcagaacgtgctctgactgagatgcataggtagcaatgtctccatgtcagcccaaagccagggagccgatgtgacctgttggacgttgttgttaggtgcccacctgaaagccagaattcgtccagcctggtgaccgtgtgggaacggcatcaaagattccagatcctaaacgtggggctgcgtgcccctatgtctttgtaagctcactcactcctaggccatcacggcgcccacttgagaccacggttcccacttcctatcccccttgcccctaattgtattcagaaagtctcatttagtgccacagtcagttgcttcaggaaaagctccatgctgggaccgatctcaggactgtggacttgtgacctctcccagcactctgagtgcacgatgcaggcagccagctgtttccgaggccttggcccctwgaccttcagcctgccttgggctcttggccagctgcccccgcgacctgagggtcagtggtagtgtccacctcttgaccctaggggcagctgccctggcttgtggcatagcaaggcttctgggtacccgagcagccccgttgtccctggcagccctccatattcttcctggctttgcgattctcattggctggcccagccatttccctgtttcccagcacggatttctgtctgcttgaaaacccaacatcttgtttccttcctgagcttgggttaggaaaaagctgccccaaaactgggtttgcaagtctgtagcatcccgaagagctcatggttatgcaacagcctgccccaggcagtgacactgcttctctgagccattaagaaagttcgatggccttggctgcaggctgtgcagccgtctgtcattgtaagttcactctctccccagcctttgtcagcgcctgggcttgaggattccaggaggctggctgtggttgtgacctcgatttctaacttgcgcacagtcgtgaaaccacctttcgaagagggggaggctgccctgcacaggggccctggcgcctcctaagcctgagggtgggcgggttggccatgtgtgctgaggtcatggctgaaatcaggggaacccagctccacccctcatgttggctgtggaagcctctgccacccctcagtgctggagaaagtcgtttcttcctggacctactgcgtgcaggcacctgggtagacagcccacagagggctttgtccccgcacaggctccgccttcggcgtgtgtgctaggagggaggaggggaccccacctggctgggcgtgagggtgggcagggggctgtctggagtgggccatgcctgcatggaggtggaasggggagcgaattaggcagaagcggcgggagtatggacacatgtgcggtgaaatggggagttcagcctgaaacctgggccctgtgtgctgtgcagtaagggattgagctgctgggcgcctgrcttgttccagcccttggactcccgggactgatagtgaggaggggccaccccctctcagcactgctaacccctcagactggagttttgtattttacagcyccttttcctgctcatcaaaaatcgaagctgcttaacacgttttttcatctaagcttcagaaagcaatttttaaaatctaaaagagccatatttaggagggacccatggccggcgcttctgtggttaacaactcagcaagagcgcctccttcgggagccttgacagacaggactgcagagtccgctgctgtgcctttctctctctctccactcagacggcttccatctggggaacatcccggcggccgagggctggtaactggagcawgacccaggaagctgggccgcaaaccacagggctcggccttgtggacaggaccaggctgttacagtcctgcccacacaattcccttctgcccgcaggaggaagtgtgcaaagctgtcccacagcctttcatggggccggacacatcctctttatcccctcagtggggccggcgcctgatgacctgtggtctagaaagctggagcaaagccgggtggccttggttgccgcttcccggggatgggacacgagtgaacagctgtgggcctgagggtgtaacacggtggacggtggcagagatagagccgtcgatggcccccctgccttggccagttcctggggcttgtctcccggacgacgagcgtgtgaaagtcaggaaaatgccggcagggatatccacaagcacctggggtggccagaactgccgtgcctcccaggagaaggagggggcctagagggccttttttctctggtgtgtggtggcttaggatcatttccatagagcttgaggtgttagggtcaaatgtgttgaactggcaagttggagcacattgtcctctaacgcatgacatggcccaggatgggtggcctgctgaggggacatgtctggaaaccagggcctgcgtggcagggggggacggggcgggctcgcctrtgccctgctctgtaayacattcagtgatgacaacccgtccctgacctagacacactggctaaaagggatttttgggccgttcccagtctgacaggcagtttgccagacagttatgtttctggtgttttaaaaagtttgagtagagcgaagtacgatcattgaagccaggacttaccaggaaaatcaaggacatgtttatttttgtgcattagtcatttgcaaagcacatagcgggtgccccaggccctgctctttgtccagaaggagccagcccagaaactcctagtgtagagaaggttttggggtgctctgaggaatgactgtgtggggtcggagggggagcctccaggggaggagtgaccagtcgctgtgtgtgatgacggcgggagctgcaccagaacaccacgcacacctcccattgctttcctccgcttccctctggcaaaacaaattccatccctggttagtacccgccatgctgagagaagcgggaagcygaaatcccaccagggcgactctagcgccacctgctgaccagccccatccaggctggtcctgaagttgctggtgtgtgtgcgtgtgcgcgtgcttgtgtgtgtgcatacattgtgtgtgtaaaagctttgaagtaagacaggccgactttgaaagccaagcttgccccttacgacacaccacggagctatcagcaagttctgcatcctcaatgggcgtctgtcttccagccagtagagcgggaggacgatgggagacagtggagggagcgagtggaaggaaagtctgctgcttgcagcctgctccctgcacccggaagcgcagttcacctgcacccggaagcacagctcatgggtcccatgctcctcccccagttcacggacgctttggtcatagctcctcagaggcccccctgggggagagctctcagatcgcctggagcactcccgtttggcctggacctgggcatctctggggcaggccaccgccagcagcacccgtgcccaccttctttcctgcctctgttttgggcccctcccaggcaggactcccccgttcagtgcccctgactcccaggccagtcctttctaagagcttggaatgatcactagccaagyaaatgcaaggcctcctgtcagtcctgacaaacctggaaagaggaggtaaaaggagaccccagtctcrataaatgcctcaagcaagtccaagtaacccagcacgagacatggaaacttaaaaagccaaaagggagatgtgatagaaggccaggacgagaggatgctcctgacctcagaatccagacacagcccagatggcagggcttcctggagcacctgggccaggtcctctggggctccgcacctgggccctgcttcctcaggcagccaccttcagagtatgatgggccaggagttcagtacacaggagacgacccctgtcccatcttgtgacaagaaattagaacttgttactatcctgtagcggaagataataccgatctccatcctgtcacaggargttagaatctgtaacaggaagttggaatctgtgctcatcctatacaggaagttaggacccgtccccgtctccaccrcaggargttrggacccgtccccgtctccaccgcaggaggttrggacccgtccccgtctccaccgcaggaggttrggacccgtccccgtctccaccscaggaggttrggacccgtccsygtctccaccscaggaggttgggacccgtcystgtctccaccrcaggaggttkggacccgtctctgtctccaccacaagaagtttggacctgtattagggttctctagagggacagaactaatggaatatacatatatatatatatataaaatggaatatatatatatatatataaaatggaatatatatatggaatatatatataaagtggagtttattaaggattaactcacatgatcacaaggccccacaataggccatctccaggctgaggaacaaggagagcagtctgagtcccaaaaatgaagaaaaaatgagtccaatgtttgagggcaggaagcatccagcacgggagaaagatgtaggctgggaggctaggccagtctctcttttcacgtttttctgcctgcttatgctgtagccgtgctggcagctgattagttggtgcccacccagattaaggatggatctgcctttcccagcccactgactcaaatgtgaatcttttttggcaacaccctcacagacacacccaggatcaatactttgtatccttcaatccaatcaagttgacactcagtattaaccatcacaagtccaccccttgtcaacttgaacccatgcacatctcctgagatcatacataatcttcaaataaagacaataataagatcataattacacctaacataactatacttcatacgaccagaaactcaccaatccccaacccaaatactattatataaagttaacgatacttaaatgctgatgtgaattcaataaatcttatgtcacttgataaaagagaaaggaaataaaatgaagtcatttttgttagtacaagtgtatacatgcacaaacatttttgattgttttttgtttgtgtgttttttaagacagagtctccctctgttgccgaggctgaagtgtggtggtgtgattttgtctcaccgcaacctccacgtcccgagttcaagtgattatcctgcctcagcctcctgagtagctgagattacaggtgtgcaccaccatacccagctaatttttctattttaagtagagatggggtttcaccatgtgggtcaggctggtcttgagctcctgacctcaagtgatcctcccgcctcggcctcccaaaatgctgggattacagtcgtgagccacagcacctggccatgtttttaaaagaaggaggaaatactcacgacaattacagtcctcgtttctgcaactggtcacatggctcgtagctggtattgatgactgccttcttctactacccrttctgtattccctttgccttcagcaagcaccttggcagatcttgttttttttttttcctggtggagtgacccaaaccttcattcctgaagggtctgggtcatttgtagtcctgcctggattgggctgttgtagtttcccattgaccttaatcacagggcatggtaatactgagagatgccctaatggatctcctgtattccatgcatactctaacttatcttcattttggagtagtagactgatttcatcttgatagtctgggtcagccaccccagccaacactgtaactcccttcttagcctgttgacttaaaggtaggaggagcttyaagtgtccaggtggcaatcttaatttccagtttaatggaatccttgttctgtctcctggtggcggcgttcctccctctggaactaagacctctaggccagcagaacgtaatgttgcaggaacaggaagcaaaaattttgctagtggatcactaggggtgatggtgagtggtgccacttccatttccacccttggatgcctggacccgtgaatcctggctatgggagaaacagtgccataatattggaccctgattcagagcatacatggccttctgtagaactttgtcccagccctgcaaagtactgtcacctagttggcattgtaattgtgacttcaaaaggccattccactatcctatcaatctacctgcttcacgacgatggggaacatggtaaaaccagtgaattccatgagcatgagcccactgccacacctctwtagcmgtaaagtgagtgctttggtcagaggcaatgctgtgtggaataccatgagggtggataaggcattcygtgaacccacggatggtagtcttggcagaagcatcgtgtgcaggataggcaaacccatatccagagtaagtgtctattccggtgaggacaaacctctgccatttccatgatggaagaggtccagtrtaatcaacctgccaccaggtagctggctgatcaccccgaggmatggtgccacatcgagggctcagtgttggtctctgctactggcgaattgggtactcagcagtggccatatccaggtcagccttggtgagtggaagtccatgttgctgagcccatgtgtaacctccatccctgccaccatggccactttgttcatgggtccattgggcaatgacaggggtggctggggaaagaggccgagtggtgtccacagaatgaatcatcctatccacttgattattaaaatcctcctctgctgagctcttttatgtgatatggtgagcactctcatgtgatacaaatatcttcacagtttttgaccactcagagaggtctatccacatacctcttccccaaatttcattgtcatcaattttccaatcatgcttcttccaagtccctgaccatccagccaaaccattggccacagcccatgaatcagtatrtaatcgcacatctggtcatttctccttccatgcaaagtgcacaaccaggtgcattgcttgaagttctgcccactgggaagatttccctttgccactgtccttcagggatgtcctagaaaggggcagtagtgctgcagctgtccactttcgggtggtgcctgcatatcgtgcagaatgatctgtgaaccaggccctagtcttctcttcctctgtcagatgatcgtagggaactctgcatgaggccatcggtgcaggctggagaagagaaggcaagttggcaggagtggagaccacrggcatttgagccacttcctcatgtaacttaacttgtgccttcaggacctgctcaagcccgatcacgtatataccacttccatttgatgatggaatgctgctgttcatgaccaactttatggctagatgggtcagaaagcacccagttcatgataggcagttcaggtcatatggtgacttgatgacccagagtcaaacattcagtttccaccaaagcccagtaacaggccaagagctgtctctcaaaagragagtagttatctgcagaagatggcagggccttgctccgaaagcctagagaccgccactgtgattcacctatgggggcctgccaaaggctgcagccagcatccttatctgccactgacacctcaagcaacattggatctgctgggtcatatggcccaagtggcagagcaacttgcacaacagcctggacctgtcatagagctttctcctgttctggaccccactcaaaactggcagcctttcaggtcactcrataaatgtgctggagtaamactcaaacgaggaatgtgttgcctccaaaatccaataggcccactaggcgttgtgtctctttcttggttgtaggtggggccaaatgcaggcaacttatccttcaccttggaatatctcgacaggccccaaaccactggacccctagaaattttactgaggtagaaggtccctgaattttattatcagatttattttccatcctctggcatgcaaatgtctcactaataagtccagtgtgtttgctacttctcactyactggatccaatcagcataatgtcaccaatttaatggaccagcgtgatatcttgcagaagcgaaatgcgaycaaggtctctccgaataagawtatgacatgaataagattatgacacaaagccggagagttgatacacccctgaggtatgacagtgaaggtatattgctggccttgccagctgaagacaaattgcttctggtgggccttggaacaggaatggagaaaaaggcatttgtcaagtyagtggctacataccaggtaccaagagatatggtaatttgctcaagcaatgaaaccacatctggtacagcagctgcaaattggagtcaccacttggttaaacttacgataatccgctgccgttcaccaagatccatctgtcttctgcacaggccaaatgggagagttgaaccgggatgtggtgggaatcaccaccccgcgtctcaagtttttgatggtgacactaatctcygcaatccctccgggaatacgatattgtttttgatttactgtttttctaggtagaggcagctctcatggcttccatttggcctttccaaccataaaagccctcaccctaccagtcagggagccagtgtgggggttctgccagctgctaagtatgtctctgccaattctgcattctggcactgggaaaatgaccacaggatgagtccggggacccactggacccactgtaagtcagacctgagctaaaactccattaattacctgacytccttaagcccctatttaactggagggccacaatgacgttttgggtcccctggaatcaacctcagctcagaatcagtgtccaatagtccccaaaatgtctgatcatttccctttccccaatgcagttactctggtaaaaggccagaggtctctttggggaaggatgggagaaagattcactgcataaattgtcagtaatgtagtggggtccttcctcaagaggacccgcctccccttcattcaaggggttctgggtctgtaaactggttcaagtctggaaattgattgaggggccgtgattctctttttttgtaattcaaattagtcttttgtccacttgatctagaagttttcrgcttatacaaatcaagtaggaatgcagtaggcttcctatcaatttcacttctaggaacactgtgattaattagccaatgccagagctctacacgagacagactattctgattgctgctttgcctctgctgtccattacagaagctacmcccaccttgcctttgatggttgagtgctgtcacttggccactgccacctcaggatccaattatttccattgtatttaaattttgtagttgagtgactgtggttcccactgttagatctgacataccaagacgagcaattacagggctcttcaaagatgcaggtgctgccctcacaaatctgtttcgaaagacattggtcaagggtatatcttctgaatcctcccaacttggttgagtaggtctaaagtgactaatccactccaccatcccaatctccmtaagtctttggattccttcctctacattaaaccaaggaagaccaagcatttccagcttgctcacagtgggccatctcttcatccgtatttcagctaaaccagcaaataaactattagaaccttttttaactccccgagttgcaacattaaatgcagagtccctgcttagtgggcctaaatctgtaaattcagcctaatccaacgctatgttccttccaccattctccgacacccttaatatccattctcatgcccgttctccagattagtttctataaattagaaaactcaagcagttcttttcgagtgtagctcacttcctcatgggtcacactctcaacctcatctctaggggcccgccaggactttagtctagttataggtctagaggcaaacaggggtgttaggggtggctcctgaggagaatcaacattatcttgcctggcaactgcctcacaggaggccatcactgttgcctcaggcagcgtggggtttatctccttagacaaaggtggaaaggctgatgggtcggggcggggatgttgccactactggggatggggaagctgttaagctgtttcttctggcaaaaaagattcatcagagtttataaactcagtgtccccagcttcatcaggctcctcccacatgtccccattccaagttgcagggtcccattctttttcaatcaatgccctcactttaacagcagacacctggcgaggctgtgcatgcatctttcattgcaggtcagccactcgcatgataagagcttgtgtctgtttttccacaatttcagctcttcctctacaggagataagactctcactcagggcaatcttagcagatttgaggctcagtatctgcttctgaagctgggagatggaatccctgagttcataattttctttcatcactttgtccactaaacttaggagcaaccaaccagcttcattatgttccttggttctccacatatgatcaaagatattatgtatagagtcactaaacttgcctcatgagcgatgaatcaggagtttcaaatgcgtttatttttcataactctctaaacagttcatgccaaggactatcagtgttctccatactattaraagtggagtccttagcatttttggatctaatcgttaaccagccaaccccagaaaccccaaaaccaatgaaagaactccatctttaatattctcttcctctagaaccactcctggtaccaaaatctgtagtagttagggttctctagagggacagaactaacggaatacatatgtataatggagagtttattaagcattaactcacacgatcacaaggtcccacaataggccatctgaaggctgaggagcaaggagagccagtccgagtcccaaaactgaagaacttggagtcygatgttcaagggcaggaagcatccagcacaggagaaagatgtaggctgggaggctaggccagtctctcctatcacatttttctgcctgcttatagtctagccgtgctggcagctgattagattgtgcccacccagattaagggtgggtctgcctttcccagcccactgactcaaatgtgactctcttttggcaacaccctcacagacacacccaggatcaatactttgtatccttcaatccaatcaagttgacactattaaccatcacaggaccyrtccccgtctccactgcaggaagttaggacccatccctgtctccacccaggaagttaggacctgtctctgtttctatcacaggaagttgggatctggccctgtggacccagatgggttactgagcttggaacacgagggcttagtgacaaggaactgggaactgacctcaatggctgagtagcgatatggctccctcactcactctgtgaccttgggaagtgggaaggccacattctctctgagcctcagtgtcctcatgtgaaaaatatcaccgaagccactgtcatggggtggtggcagtgatcacactagagagtgcrtggtgaggaagagctgagcacttggtaaacggcagcagctctgattgctagtggcagagatagtcatttcatgggtcacctccgagacacaaccaagagccctgcgtagccctggccactgtctgggcaagggcctgggaagggcagggtgtgcctggggagtgcccctggggtggggctctgccagtgagcaggggacgcacctcactccgggcacagcctttggcccccggccacccagcgcccgagatggtgttggaagaggctagtgcctgaatcagcagcctggaggtccacggcgcctcccgcaggtgagtgaggtgtgcccttcgtgttggctgaatcggccagaggggcrgcgggaggycccgcctgccagccccgcatccccgcgctctgccgtttctccgcttgctggaccggccctaaccctcttcttgtctctctgcccacttttcttgcagccgctgtgagcgcttgccttgccatgagaatcgggagtgctccaagctgcctctgagaataacctactaccacctctctttccccaccaacatccaagcgcccgcggtggttttccgcatgggcccctccagtgctgtccccggggacagcatgcagctggccatcaccggcggcaatgaggagggctttttcaccaccckgaaggtgagcccccacagtggggtggtggccctcaccaagcctgtccccgagcccagggacttgctcctgacygtcaagatggatctctctcgccacggcaccgtcagctcctttgtggccaagcttttcatctttgtgtctgcagagctctgagcactcgcttcgcgtcgcggggtctccctcctgttgctttcctaamcctgccctccggggcgttaataaagtcttagcaagcgtcccacacagtgagcctcgcgtgccttggttttatttggcatggttgggagtctgtgccgcttgttacccgggggtgagctgggcactggccaccgcctggtaccccygagggctgactgaggagcgctccccactagagggtgtgtgctcgggggtccctgttcacagagcccactgtctgtgccgacagggaggccaggccgggtacatcatttcacatgtgttaacttgtcttcatttgtgttgaacccaaagaataaaggtggtggtggagaagggccctcagattgctgagcacagtcccctctcrttttacagatgtggaaactgaggcccagagagaaggggaagggttggccagggtcgtctggcctgctgtggccatgccaggtcaaggaagcgggtctgctggcccctgcctggttctttgctgtatccccggaggtgagcatttcactgagacaagaaagctctctcctgagattcaagcctcctcttctgtttgtcttgatcagaagcccaaatctgtggtgcagaaacacgggatgcggttgcggctcctaggatgcagctcttgcctcagtgaagtcgttttgcccccactgaggatcctggccctgtgccggggsgaggcaaaggaccacacaatacatgtgatactcasggratccttcataggccttacaccagtcctgccaggcaggtggtcatcctcatgaagactcagagagggcaagtgatttgcccaagatcacacagctggtatccgagccctggtttactgactccacagatctggctgttgcgttctgccagaatacctccactgagggccttaaccccctgcctccctccatctcctccaccatggtccagccaagccagtcatctgtccccctctgctgctcccagcgtccattcacctcccctacagctcattctttgcttagcagctggagtgatcttttagcctctgcctaaaaccgttcctggcttccttaccatttgggttaaggcctccagatcctcaagatgtctgaaggccgtgcctaatttagtccttgcatgcaatttccagcctggcctcaacttgttctatccttgcccacttcccttgagccacgctgcaagctctgctgcctccrgcccttggtacgtgctttgcacccttggcctgaatgttgcttaaactccagctcatgtgcctgcctcagagaggccttccctgccacccctggcttctgttttctctgtccgtccttctcatgacccctttccttcatggtgcttgtaacaggctgcggttcctgttgactcgcgtytcacatttgtcttccgcaccttccagaaggctctgtgaaggcagggaccaggtctatctcattcagtgcrgtgttcccagctccttgcaagacatctcgcgtgcagaaggtgctctgtcaatgtctgttcagggaacagatgactctgccagccctggcttatgtcactagcatttctgtggctgtgacactgtgctgacactgtttccaggcagaaatccaagaagggaaggcagaacaccccagcgggatcaagtaaagaggactgcagggttcttccatggaagcaggggttggaggatacccaccttgatgcctagtgaggaagatggacctggacagacagtcagctccacaccttgcgctgagcagctgtgattgtgccacgggagcatgagcccttttccccacggcccttgccactgtctcctggccctctctctgatcatgccaggtttgcaccagcctcgagtctcccatgttgtagtacattctccaagatgcagcccaggagcctctctgaaggaccagtctggttacgatggtctgagcttccttagaaccttccatggttgtcttttcccagcagatgaagcatagcctccttggaatggcatgggaggcctggcctgatctggcctctgcccaccctttgagctgyacctgccccaccccagctcatccatgtgcttgtaccctggccccacggggaggcttgcccttccctgaatstgccttcttgtggctttagcatgtgccatgctgtccccctgcagactgccattctccttgcagacttggctcagaagtcacctcctcagtgcagttagcctgagctcccctggccccaggtgcctccatcagagcatttaccccattgtgttgtggctgttccttaacgtccccactagccaggctctttgagggcagggattgtgtctggttaatttctgtattctctgcaactttgcaatgtttggcttgaagaaggagctcagtaaacatctgaataaacatgcaggttgatggatggatggacagaccaatggatggatggatggatggatggatggatagcatttttaaggcttagttcaaatatcgtctcctcagccaggtgtggtggctcacgcctgtaatcccagcactttgggaggccgaagcaggcagatcagctgaggtcgggagtttgagaccagcctggccaacatggagaaaccccgtctctaccaaaaatacaaaaattagctgggtatggtggcaggcacctgtaatcccagctactcaggaggctgaggcaggagagtcgcttgagcccaggaggcagagattgcagtgagctgagatcggagtatkgcacaccagcctgggcaagaagagtgagactctgtctcaaaaaaataagtaaaaattgtctcctctgtttagccagcaagccacagcaggggttcttgtcctattcaggcatccatttgtcaggggcgggattactcaggctggaaggaacacctgtgccttcatgtgcatagcaatgtgaagaggtgggggaaacctctcaggggctttggaggctacccagtgaccttccacagcttgccagaagctcctctgcaacattcccaccaagggactcttctttgcttgtggaactccctgcctcctgaggggtcccgttgcattttgggatcccatcgacgtttgygtgtgtgcctgagtgcactgtgggagtgacagctgagtgacctgagtgctcacccctgtcccgcagctccttggggctccttagccatgttctcggctcatgctgctgacagaggacaccatgcaggaaaagcaaaataagagcaggaggttgaatttccttcttgccatttactagttctgtgaccctggatacatcgtcagcctttcagagcctcaaggcccaccttatggttgattttgaagatggcctgaaatagtccagcaggcagygcctgatacagagtaaacactccataggtgtgagtgtgggtttcttcattcattggaaggtaactgggtgttcgtgtggcttttcattgaaatggggatgaagattcagagagtttggagggatccaaggtcatatgtggagctgacatcacttttgattcagaacctgtgctttcctggttgtgtcactagtaaatcaagctcccaaggagaaaagacagcaataagggtgatttttattgtaatgataataataacaactccaacagctaacacatagagtgctgaccatgagacaggcgctgttccaagcatgtaattcgtttactcttcacagcagcctagggaagcaagcagtgctaatatccccattccacagtgaggacagggaggcacagaaaggtgaaggaacttgcccaaagttccacagctggtttccagtggcactgggattcagacgcaggcagcctgggctgggatctgtgctctgrtcccctgtcctccactgcagcaaatacgggggagaggcagcatccctgggatgaatgagactgttgctccagccccatctcacagagcccgctctgccattcccaaactcaaaacaggatatcttattagctaaaggaggaggcagtgtggtaaggaggaaagggctatgaggctggaatgaaataagatatgcaaaatgggccaggtgcggtggctcatgcctgtaatcccagcactttgggaggccaaggcaggcagaccactgaaggtcgggagttcaagaccagcctggccaacatgatgaaaccccgtctttaccaaaaatacaacaattagctggtcgtggtggtacacacctgtaatctcagctgctcaggaggctgaggcaggagaactgcttgaacctggaatacagagattccagtgagccaagattgtgccaccacactccagcctgggcratagagtgagactttgtctcaraaaaaagatatgcaaaacgtgtagcrtagagactggaaaggcagatgcattatttctgaagctctctagatcccaaccaaaaaacacccarasaactagataggaaaaaaaatgtttccatggaaaacatttacaaacgaaacaaggtatggttgtctgcagttcaggcccacctgcatgactttggcatctgtgcaggaaaaaacagtggcagaaccccaaaataatcaacaggtatccccagaaagtgtactaggtgctttgggggaacagcagctgaaactgggaggcgttttsctcactccaggggccagagtgtgcacagagccagtgggagggaggaaggggctggcgcaggcttgctcttgggagcttttgaaacttagccaccacagctctccctaaggtcagagtctcacacgagggagagactgctggaaatggaacagaaattgtgtagaaaagagaccatagagactgtgggaagagaaggtccgggtaaatgtggaagaatgtcaggaggtgagctctgcaaagtcaggaagataactgtgaatgatactctttctcaaattccaggaaaactagtttcctttaaggatgatcaacccaaaagcatcaaggtcaaattccatggatgagtttctataacaaagtaccatagactgggtggcttaaaataatagaaatgtattacttcatggttctggaggccagaagtccaaaatcaaggtgtcagcagggctgcacttcctctgaaacctctaggggaatgcctcttctgtaggggagtgctctttctgtaggggagtgctccttctgtaggggartgctccttctgtaggggagtgctccttctgtaggggaatgcctcttctgtaggggagtgctccttctgtaggggaatgcytcttctgtaggggaatgctccttctgtagggcatgctccttctgtaggagaatgctcctgtaggggaatgctccttctgtaagggaatgctcctcctgtaagggaatgcctcttctgtrggrgartgctcyttctgtaggggaatgcctcttctgtaggggaatgctccttctgtaggggagtgctccttctgtaggagaatgctcctgtaggggacttctgtaggggagtgctccttctgtaagggaatgctcctcctgtaagggaatgcctcttctgtaggggaatgctcctcctgtaagggaatgcctcttctgtgggagaatgctccttctgtaggagcatgacttgtctcagcccctggtggtttgttggtgatcattggtgttccttggctcgcagctacatcgctgcaatctctgcctttgtcatcacatgatcttgtgtgtctttgtcgtcacatagccctcttcttataaggataacggtcatcttggatcagggcccaccctactccagtgtgacctcatcttaactgattacatctgcaatgaccgtagtttccagtgacgtcacattctgaggtactggggatggaactttgacatctttcttggaaggatgtaatgcaaaccatgacacccatagaaagtgttaggggctgaattgtgtccccccccaaattcatatgttgaattcctaatccctaatacctctaaagtccctatctccaaatgcagtcacattcaacgaggtaattaaggtaaaagtgagatcatatgaatgggcccnnnnnnnnnnnnnnnnnnnnnnnnnnnnnnnnnnnnnnnnnnnnnnnnnnnnnnnnnnnnnnnnnnnnnnnnnnnnnnnnnnnnnnnnnnnnnnnnnnnnnnnnnnnnnnnnnnnnnnnnnnnnnnnnnnnnnnnnnnnnnnnnnnnnnnnnnnnnnnnnnnnnnnnnnnnnnnnnnnnnnnnnnnnnnnnnnnnnnnnnnnnnnnnnnnnnnnnnnnnnnnnnnnnnnnnnnnnnnnnnnnnnnnnnnnnnnnnnnnnnnnnnnnnnnnnnnnnnnnnnnnnnnnnnnnnnnnnnnnnnnnnnnnnnnnnnnnnnnnnnnnnnnnnnnnnnnnnnnnnnnnnnnnnnnnnnnnnnnnnnnnnnnnnnnnnnnnnnnnnnnnnnnnnnnnnnnnnnnnnnnnnnnnnnnnnnnnnnnnnnnnnnnnnnnnnnnnnnnnnnnnnnnnnnnnnnnnnnnnnnnnnnnnnnnnnnnnnnnnnnnnnnnnnnnnnnnnnnnnnnnnnnnnnnnnnnnnnnnnnnnnnnnnnnnnnnnnnnnnnnnnnnnnnnnnnnnnnnnnnnnnnnnnnnnnnnnnnnnnnnnnnnnnnnnnnnnnnnnnnnnnnnnnnnnnnnnnnnnnnnnnnnnnnnnnnnnnnnnnnnnnnnnnnnnnnnnnnnnnnnnnnnnnnnnnnnnnnnnnnnnnnnnnnnnnnnnnnnnnnnnnnnnnnnnnnnnnnnnnnnnnnnnnnnnnnnnnnnnnnnnnnnnnnnnnnnnnnnnnnnnnnnnnnnnnnnnnnnnnnnnnnnnnnnnnnnnnnnnnnnnnnnnnnnnnnnnnnnnnnnnnnnnnnnnnnnnnnnnnnnnnnnnnnnnnnnnnnnnnnnnnnnnnnnnnnnnnnnnnnnnnnnnnnnnnnnnnnnnnnnnnnnnnnnnnnnnnnnnnnnnnnnnnnnnnnnnnnnnnnnnnnnnnnnnnnnnnnnnnnnnnnnnnnnnnnnnnnnnnnnnnnnnnnnnnnnnnnnnnnnnnnnnnnnnnnnnnnnnnnnnnnnnnnnnnnnnnnnnnnnnnnnnnnnnnnnnnnnnnnnnnnnnnnnnnnnnnnnnnnnnnnnnnnnnnnnnnnnnnnnnnnnnnnnnnnnnnnnnnnnnnnnnnnnnnnnnnnnnnnntgtaagggaatgctcctcctgtaagggaatgcctcttctgtgggagaatgctccttctgtaggagcatgacttgtctcagcccctggtggtttgttggtgatcattggtgttccttggctcgcagctacatcgctgcaatctctgcctttgtcatcacatgatcttgtgtgtctttgtcgtcacatagccctcttcttataaggataacggtcatcttggatcagggcccaccctactccagtgtgacctcatcttaactgattacatctgcaatgaccgtagtttccagtgacgtcacattctgaggtactggggatggaactttgacatctttcttggaaggatgtaatgcaaaccatgacacccatagaaagtgttaggggctgaattgtgtccccccccaaattcatatgttgaattcctaatccctaatacctctaaagtcccyatctccaaatgcagtyacattcaacgaggtaattaaggtaaaagtgagatcatatgaatgggccctaatccaatacagcaggagttcttataagaagggattagggaccaggtgtggtggctcacgcctgtaatcccagcactttgggaggccaaggtgggcagatcacaaggtcaagagttcgagaccagcctggtccacatggtgaaaccacacctctactaagaatacaaaaattagccgggtgtggtggcakgtgcctgtaatctcagckacttgggaggctgaggcaggagaatcgcttgaacccaggaggcggaggttgcagtgagccgagatcatgccactgtactccagcctgggtgacagggcaagactctgtctcaaaaaagaagaagaagaagaagaagaagaagaagaagaagaagagattaggaaacagacatgcacagagggaagaccatgtgaggaggacacagggagaagtcagacttctacaagccaaagagagaggcctcagaaagaaccaaacctgccarcaccttgatcttggactttcagcctycagaaccatgagacaatccatttctcttggttaggccacccagtctgttgtatagcaaacaaatgcacagctattataagcaaaaaagagaataagagmcagaatgatatccctctgggtaatgaaagcacaccagaaagacgtgcccagactaaatgaaaattctaatattctatcttgaaagaaaccaaaagtgttaagaaaataaacaaamcatagaagaaaaatggggccgggtgccctgtaatcccagcattttgggaggctgaggcaggtggatcacctgaggtcaggagttcgagaccmccctggccaacatggtgaaaccccatctctactaaaaatacaaaaattagccaggcatggtggcaggtgcctgtaatcccagctactcaggaggctgaggcaggagaatcacttgaaccagggaggcaraggttgcagtgagccaagattgtgccattgccctctggcctgggtgacagagcgagactctgtctcaaaaaaaaaaaaaaaaaaaagaaaagaaaagaaaagaaaaaaaaagaaaaagaaaaaaagaaagaaagaaaggaaaatagaaaaatcgagtcagaattagaagaaaactgagaaatgaagtaatagaccaaagaaacaaaaagttaaaaatttcagatgtaaatactaaactagatggaacacaaaagtgaataaacagataaatagaagttgaaaagaacaacaagttttaaaaatcaagaaagaaataacaagagatgaaaggcttgaagaaaaagtgacaaatattcaaaatctgtaagaagatctgacatttagataataggactccctgcagaagaagccgaatacatgggggaaagtactatacatgatctcaagaaaactttccataaattaaaaaagagatttgaaattccacattgaaataacacatagcgtacctgagaatatcaacaagaacaaccaacaccaagacacataacacattcttgtgaaattattgtactttaaagaaaaggaggaaggccrggtgtggtggctcatacctgtaatcacagcactttaggggccaaggtggcagatcacaaggtcaggatttcaagaccagcttgaccaacatggtgaaaccccgtatytactaaaaatataaaaaattagcatggtggtgcacgtctgtaatctcagctgctcaggaggctgaggcaggagaatcgcttaaacttgggaggcggaggttgcagggagccgagatcatgccactgcattccagcctgggaaacaagagtctcwaaaaaaaaaaaaaaaaaaagaaagaaagaaaaggagggaaaaacaaactatgaacatttaaacaaaaacagtaagtgatttataaaggaaaaaaaatgttctcatcagactctttgacagcaacactttatgctaaaagaaaataaataacatattaaggactctcaagaaaagttaagcccagaattttatacctagcaaaactgactttcatgtgcaaaaagcataaactattatgaccatgcaagcattaaacattcagttacttctaaaactacaactaaatgagtgttataaggaaaagagtatagtatgaattactggataggtcagacaatgtagacatagcacatttatttttaaactctgagccgaatagggagagcatatcaaaaattattttcaataattatgttagtcatggtaactttagaattgttatcctgaggctactgtgtaggtaatgtgggataatgatgggatactgcatgtccttgaggaccaggattctgatgtggaagaaagaatrtgcctttgtaatacagaagagattaattaaaaaaccatatggtccttcttttgaattggatatcagtatgaactcttggtgtatattagtttttaaatgttcactgaagaggcctagaaacaatgaccaaccccctagcactgagcctccctagtatccagactggtcttgataagccatttctcactaaaaaacaaaaacaggccaggcgcggtggctcacacctataatcccagcactatgggaggccaaggcaggcagatcacaatgtcaggagttcgagactagcctgaccaacatgatgaaaccccatctctactaaaaatacaaaaattagctggtcgtggtggtgcccgcctgtaatcccagctactcaggaggctgaggcaggagaatcacttgaacccgggaggtggaggttgcagtgagcygatatcgcaccacagcactccagcctgggtgacagagcgagactcatctcaaaaaatatataaaaataaaaataaatgaaaaacaaaaacagaaatacaaatccaagacttcttggagaaatggttgattccaggtcttgggcagtaaaagtgtaaaatgaggctggatcatctcgtcacatcagatagcaagaaagctgtgaaagacgacaagggctgggccaaaaggacccaggagccaacttcattttccctctggcaagagatgggaaaatttgagtttcaacaaaggataaaaattgcagaggatcaaacctcatcggagtggcttccatcatgggttcatactgatttttttttccccaaaaatcctttggagaatgatagcacactagttagcttattatcctgaaaattagaaaattcaaggaaacaaccaagtattgatctgctatttcctggtaattaaatcacaagagcacatgaagggaagcatctgtttacaggagtagtccagctaataaatggaartgaagtggtagaaccagactatcggcattttgcaatccttgatgaatcagtgggcgtaggccttgagcatcagtagatgctgtcctcacagagacagccagtcactgtgtggctctcactgaagacacactaccacctaccatcttgccaaagggaccgggcctgcatgggatcaggcctctggatctggctgccaatgtccaagaaatccagtggacagaggaccatgctgaactgcaccgtgaggatgcaatcagcaaagtccagcctgtaggaaacacaacagctcaaattcttcaggttctttaatagataagttgtatggaaaataaaggaggccgggcacgttggctcacgcctgtaatcccaacactttgggaggccaaggtgggtgggtcacctgaggtcaggagttcaagaccagcccgaccaacatggtgaagccccatctctactaaatacaaaaaattagccaggcatgatggtgcatgcctgtaatcccagctacttgggaggctgaggcaggagaattgcttgaacccaggaggcggaggttgcagtgagctgagattgcgccattgtactccagcctgggtgacgagcaaaactccgtctcaaataaataaataaataaataaatagaaaagaaaataaaggaacagagaagaaacctgtagcttaaaatggacttaaaaggcagagcaaaaacttgttgatggacaagtctgaatgattgtgtctagagacgcacactgatgtgagaaaactatgaagaaacccaagtaggccgggctcggtggctcaggcctgtaatcccagcactttgggaggctgaggtgggcggatcacaaggtcagaagttcaagaccagcctgaccaacatggtaaaaccctgtctctactaaaaaaaaatacaaaaaaaattagccgggcatggtggcaygcgcctgtaatcccagctactcaggaggctgaggcaggagaatcgcttgaacctgggaggcggaggttgcagtgagctgagactgtgccactgtactccagtctgggtgacagagcgagactctgtctcaaaaaaaaaaaaaaaaaaaaacccaagtagagcactgccgtgggactcaggctaggggtcactgttgggttgcaggaggggttgagttctgtctggcagttgcggggcgtttggtggctggccaagttctctttcttgacctgggtggtgattataaaggcrtttgccttgtaataactcgttaaactatactttcattttgtgtaattttgtatccgtgttttattttatgatcaagaggttgtaaaaatctgtctagcacagtacctggaacccagacctctgagagactgtagcctcttctcctgcctccccgtcacctggtgatgtggaattgactgccctgtgctgggcaccgagcttggcgctttctatctgctccttcgtttattaccctgctgcccagcctcactgtgggctctgagaaggcgggaccatgtgtcccttgttcactttgctgtccctagcagcyggcgcctggcactcaaaacatatttgttgggcaagtgaacctgtgactctattttgccattgtagctattgatgctcaattcgtgcagttgacaaatgtccaagctgtgcttatccgccagggcacatggaagctggagggtgttgctggcatttaggtcccggtccagtttgcaggaagggccatgaagcctccccacagagcagccaggctgcagagaccactgtcgttytctgatggagctgtctctgggacagatgcccctgccctggccacctgctcctcctccctagacctcggcccctgtgggagctgctgtcccagcttcccygtcagcctygtgtgctgtggttcccctcaggctccagcaggagaagacagacacggtccgctgcatcaagtcctgccgccccaacgatgtcacatgcgtgttcgaccccgtgcacaccatctcccacaccgtcatctcgctgcctaccttccgcgagttcacccgccctgaaggtgagtgggatgggtgtgggggtcccagggccccctagggcctccctcggcttcagckgagggcttggcctacaggagttgttccttgtaagatgtggcccaggctttgaaatgcasaactttcttttttttttttttttttttttgagacggagtctcgctctgtcgcccgggctggagtgcagtggtgccatctcggctcactgcaagctccacctcccgggttcacgccattctcctgcctcagccttccgagtagctgggactacaggcgcccgccaccacgcctggctaatctttttgtatttttagtaaagacggggtttcaccgtgttcgccaggatggtctcaatctcctgacctcatgatccacccgcctcagcctcccaaagtgctgggattacaggcgtgagccaccgcgccyggcaacttgacatgcagaactttctttgtgtctgtgtcccccccacacccacctggcacagcagcatttggcccattctcagctttccgttcaggtggtcttttcttatgggtaacggttgttctgcagagagccattaagcgctgattctgtgaccagcactggagaatcagggagggcctccgggaggaagtgatggcyaggctgggtcctgagtggtgaggtatttgagtgaaagggggagaaggggaggagggtgcccagtggagcaggacatggccagaagggtctggaggtatgggggggcggtgtgggcgtttgagaaactgagccraggttttctgctggagcgctagaggcttggcaagaggtgggctggaaggataaacaggaggctaaaactggagttgggccttcaacccccaggctttgggggaaccatcggaaggttgcagtggaggaggtttgcatatagaaacatcatcctgttgatccagggccaggtgaactggaggggccagacggggagcagraagctcaggtgtaacccagtcagtgctcccacaccccagcctggctctctaggaagctcctggcatgcagtgtagtcatgttgtgtaacctgccatcactgcaccgtttctctggagcagggcctgggctgcgtgctcccaagcctggcagagggctatggatggagcattgtcctgttcacctcgcttcctggctgtgctgcccgtgtgcccggtccccaaccacccccgccctctagggagtccctatccctggcctgcggagaagcatgccatgatgagttcattcagcagccgtggacggagcccctctgtgtcaggctctagggacatggtgataagaaggggtcctcccaccctctcaggggaggcatgcaacggagccagccrcgaggacwccagtgtttacaccatgacacaaccatgcgggggggtggggggaggagaggctccctcagcacgtggttgcccaaggagccgtccccagtcccagtccccctaggtttgctcctcccgaaaaggaatarcgctgaatcgtcacagggtggcacagacttgggtcagagaaaataactaactggtatttgccttttgcaaaatgatggggtttcaccaaaccacatacaaatccttcccaaatccccagtggctggttttgtggcctctccggccagccccgatctgagtgttggttatcgcagggagccgagtgccgttgggacacctgttagcatcttgggcccaggaaatccacaccctgaccttaagtgctgaaaggacctttagtgggtctccgccggcttccttcctcaccttacaggtgaggaaactgaggcccacagagaggactcccccaagacagcccagagctggggctgccctgcttcactgtctgatctgggagatggacacacaccccccagagaacccaggccaccgctcagggtggcccccctgacctgtggcactatagatgggagaggagcccacccctctggcctttctgctgtctccctctgtcccctcactcgctttcctcctctggtccccaccttcatgartatgcacagtgactgatgacttctcaccagcccttcctctgattagctctgtgtccccraggaagatccaaaatctctcctgacttcagtttcccctgctataaaacagggatgggctatgatataggaaggtccagacccctccaccctccccacacaggggatctctggcttcattgatgttgtctcatgaaagggccctgggttaggtcttcattccccaagggtgagttcctggggacgaggctgggactggggctggggccaggctgtgctgagcccttctccattctgtgcctctgcagagatcatcttcctccgggccatcacgccaccrcatcctgccagccaggctaacatcatcttcgacatcacggaagggaacctgcgggactcttttgacatcatcaagcgttacatggacggcatgaccgtgggtgagtggctgggaatatcarctctatccaggcacccctccccctccaccccgaaaccctctctggcccagcccaactcccatctgagtcccctccccaaattcaagcccacccaaccttcagggcccagcgccgaggccaccacagctcccaatcggtctcggccggaggaacagccagagtgggggatcctgcctgggatctgaccctagctgtgccacccactctctgggtgacccctctgggtctcggtctccctgcctataacatgggtgggttccagagagcgctgcgcctcacaaccatgaatttcaaatgataccacccaagtaaagtgcttgtcctgagggctggcacagtcccgcggtcggtgggagctaaggggattgttattcttggggtgcaatgggagggatagcaaagtaggaatcagagggcctgagctctggtctctcagccttggaactagctggattcgccatgtggccttgagcagtagtcgtcccctccctacgcatcagttggtaagaggaccaaggccactctgtgtgcacagcccatctgaatggggagctcactgctctttctccctggagatccggtgtttggggagcgtgaagggaggckggggcatgaggggactgtggaagtcctgttggtgggtgcaggctggggaagatgtttacaggcgggggcagggccctccctggctaggaacgggctttaatgacaacctactcgtgtgaaaaaatatccaggcccactccattccgcacgcttgtttctgtcattcacagcccctctcctgaactgtcacattttaaaagatttacagtcatgggaaatgaaaacggtggcatctgccattttggactcggatttatactctgaacactttcaaagcagctgagcaacggacggacagtccctgacctcccctgggcctcagtttccccattgtgaactgggaggagtgggcttcctagtcccttaggcgctggagtccgggaggtcctaaccagaacccacgagcgtgcagtgcgcacagagcagagcgttttggagcctggcctccaggtggcgctgttggaccttggacgctcagtctttgcgcctcaaacccgacggttgttaaaactggcagctggagaaagggaatcgttattcccgtcttgccaaagagccatttatagcacctttacaagcttttaaatgggtttgcatgttgtaaacatgactgagtcactggggggctccccaccccagcctcctcctgcgctagctggcagcaggaataattagttaattacaattaatggtgcattagccctcgcgtgattccaaggggaaggcgcatggtttggttgtcggcagttgtgaaacttgctgcttgcccttgagtcactccccactctgggcctcagtttcccccattgtgaaatgagagtttagatgaagacagccttgagggtccttcaggcccctgtgcaggagggcaggcagggagggggttgggtcagggctttgtcctgtcccamtgggtgggtggggtatgcaccctgacactggcccacagccgccccccgccccaaaggggccagccctgtgcttgatgctgggcctgcagttgtggctgggacatggccctcaggtgatttctagatcttggaacatgggagtttggaatcctaggaccttctagttcactcactcattctttccgtttctgaacccttcttgagcctctacctgtgcctgaccctgggctragccttgcagatacagagatggataaatgccacatagcccctgaggactttgcatctcagcagcagggagaagccaccccgtatcagatcatcaaaatatgatgccgaaataggcatgcacagagacaggccttgatggcctgtggaggctctctyaggggaagtctcctggcaggttttacgtctttagttcccacctacatccttcctggggtgacccaagcyaagaggttgggcagctgctgggcctagaaccagcacccaccagcgcctttctctggctgcatctgctccagacagaaccaacctgggagtgtctgtttctcagcttcccatccactggggcagaaaatcctggcatgtcagagcctggaggctcctagagaccatcccttccttcttccgtaggaggggaaactgaggcccggaagggcgagggggcttgccagtcttcttacagtgaatcagggacacagtgggcaatggaaaggagtcccagggtatgagagatgatcacaggtgccgtcccggcagcgggcttctgggaacggaatgtggatgaggccacaaggacccagcggcttcccccggcacagttggtcacgggtgccctggtctttggaattctgggctggggctgcgtgggggagggccccagcctggcccttggaattgtcgtgcctgtagccctgtgtgctggggaggcccctgcctcttccacgcctcggtctgtgtgcaggatgccccacctggctgggctcctggagttgacctggtgcccatgtcatctcaggtggaagactgagaccagggaggcaagccctgcgtgttgggacctaggctgcattgctggctggctcctgtctctgtccccactgcgctgatcttatttctctgtctgagatctcctccttgggcttccatatccctacttccttctccctcctcttctgcccagaataacttccatacatcctgggagcttcctggtccctaggggcagccatcccggcacacggctcctggcctgtccacctggtaatagatggttccaccgttggactcgagcccagcctgaagcagccctgaaaacgtggggttgaacccttgccggctccttaccgttgctgggcaccttcacccccgcattccccagtcctcacagacactgccagcgacgggtcatgattgtctcccttgggcaaaggagggagctgagttaaatgaccgcctgagactgtgcaactgaaaaactgcagggcctgggatgttttccgacttgtttttagcagtgcagttctgatttcaagcagtgacttaggcagaaacccttcatggtggtggagaggaagaaagcggcttccagggctgctgctcctggtggrgagcgtgggaggctcttgagcctcctgggcagccccgtgcagctctgtgctgcctgcagcacacggcagggaacgccgcctactcacggtgcttgctgaacacctgtctgctctaggccatgccctgtgtggacactgggcaccggatcaggagggcttcctggaggaggtgaggcccgagctgagtgtccttgcatgtgagggagtgacacttagtgagcacctgtgatgaccaggagccagggtttcatcatcgccaggaccctgtgacacggtgggattatctcctctaacaaaggagagagcgagagccagagagggcaagagatttgcccgaggccactcagagctggggccagagcgggcctggagcccggtcttccccagacaccacacccgcccagagccggagcccagggttgactgctgctgtggtgggctaagttgctgtgagtttggatgtcccagaaaaacaatcagcgcacaggccccggggctcgccgtgttcagtcctcccagastaacagaagaagagggagaaatgccccgagtccactaagaacctgcaagggccgggtcgtcctctaatgtagccttgaaagacccgttcttagcggggatcgaggagcccgcagcagggcccgcgccgtcgtctttgtaaagcccccttgcattcctctttaaccggctgtcaaagaaaaatgaagaatgcgttttcgccctgtgcaaaaatgctccattaatgcccgagggattctcaggccactacaaagctttccttatctggctctggattcattctcagctctgcagcctgtaatccggggtgctctgggaagagatctttcaggtagtatatcctgagtgatgactaatgggggagccctggctgcagcaggggcgggctgtgtatcatcagcgtgcggawgagagagacagaaaggcaactcgaggccacccgggctccccgggcccctgggctatggctgctgtctgagcctcagacttcccctccagcctccagatcaccacttccttttaactctcaggccagccacatctgtgtctgtctggctccctccactcagcctcaagacccagcatgtgtgtgaccacttccaagaagcctcccctgactgctccagggtcatggctgtgtgataggagggcctggcctgcaaaaacgccctccctatttctccagggagggaaatctgtgtgctatgaggcttggttgtggccacatttctgttaaaaccctgccaatgccaacaggagctacagagcctgcaggtgaagtaattctttggcctacggacgaattttgcatgtggacctcctgacccttgggcctcccgggttgcagggagctacggagttgtctttgtagttttttgcaggccagcccctcctgtcgcacgggcatgaccatggggcagtcaggggaggcttcytggaagaggtcacacacattctgggtcttgaggctgaggggtgagccagacaagtgggacacccaaactcacagccacgtctgtggctggcccatgaacagcgcgatgagaggcagggagccaggaagggagggcacagcctgcggtttggggctgctggagcatccagggtgcagggagggtcgaggggaggccgaaaggggctgcagggccaggccttggtggatgctgtcctggggaccacgggagccacgggaggtctgtgctgcccatggagcttccagatcccgctgctttatttaacccactgggcctcctgcagcttgaggttgcggttgaggttgtacccactcagcaggtaagaagactgaggccggaagagccaagtccccaggatctcccagccaggaagtgttcgaggatagggcttagacctgaactgcccagatcygggactccccatccccatggcctatgttaagccctgattattttttctgrtctatactagctggtatctacactggctggcatctgtcagccgtggttgagtctgagtcccagccgtagaggataaatagtgaagcacctcctttcacacagtcacagtgctcccggccatgggatcttgggtcctgggccagcccytgatgaggaaagacctccctgtatgtccaggcagtcaaaagatgaagttcagatgtcaccatgctgcggaatggcgaggtcctggagggtctctctccggctctttacctgccgagggcccactcatccttggtcacacaggyracccatcatgctgctccctgggacccccagacctgcctcctttccaggacccctcccagcctcaatgattccccagtgacagccacagccgcacctggtgcagatagatgctggggctggctgcaatttagggaggatctttctaggctggggcaggagcttcacggctgggaatgggctttaatgacaacctacgcatcttagaagacattcagacccactccactctgcacagttgtttctgggcaagccctctgatatgatttagtgcaygtgtggctgggtgtggagtgtgtgcgtgtgtgtgggtgcrtgtgagtggtgagtgcrtatgcacagggtttgatctctgagatgttttatactctctggcttggagaarggacagtcctgtagtatcaagaccagaccttgtgtccccagcccaaggctgccctgggccyagggacagtatttggagacttyrctggcagttttgcgttggaatcacctggtgcctccctgtacgtccacccaycctgtgcccagakccccttcgcaagcaccatatgctgttagatcctcgagcagccttgtgggacagccaccctggggctggtatcaccatttatgtaagaaaaaaaaggaagtgctggcccagggtcccacagccagcaagttggagctgcactgcccaagcaggtcctttagtcagctctctgttgtcccccaagcccctcagccccccaggcagctctaagggctcagctgctgcaggattccttagagaagctgaagggtttgggtcctcagctcctggccggggcaagtctggccaagcagcatggcagcgatgaagtccacatgatcgaagggtggatgcttaccttagacagctgctcaccttagacatggtcacctatattacatttaggaaggaaacgccctaattggagactctgcatctcattaatggaatcagatgaaacgatgtatgtgaaagctcccagcagtgcctggcacacagtgggtgcacaggatgtaaatactgatggaaacctaaatgttctgtaaatatcagttcttcctaatttcgccttgccgtctctcttgagagtggctataccttctaggcctgatcaggaaggaagctgggttttggtgtgccagtcaggtgagacgcagagaagacagcacaatcaacacaggaagtaacagaagcagctagttactcacaggtcctagagaggtggggagcaccccttgcagggccaatgggaaggggaagcgcctgcagcatgagagagagagagaatgagagagagagacagagagagacctgtgggaccaaagcctytactggggtccagggtgttatccaggcaggtttcccgtgaggaattctaaytggggggcttggagcaggcaggagttccctgaggtcatgcggtggyggatgggggtcacttctgcataggcctgcactatcgatgtaggtgtgagggtctttgggttgtatccagctgtcccataaggcaggggcccccaggaggtggtggtataaggcagtcctctgggtcaaccgccttaaggaactgggaggaggtggagaactggaacccgcagcaagggtgactgagccctgctctggtgtgggagttaaacgcacattcagaatgcgtgccgaggcaacayaggatgagaagccggcacaacacccaggcttttccatgaaagtgaacttgacagccgctttcccacattgtctgtgctgagtcgtgggagcctctgagttttgccagtgtgtcaacgcgctcctgcagcactctcacccccacttaaagggaactaccacagtttatgttttgaaatcgcattttaaattccatctgtgggtgtataaggattattacccaatttcaagtttaccrtttgaaaaatagcaatggcgtgagtggccccttttaggcaaagtgtgattgggtctgtgtggccgcggcaaactgctctgggcttgcggctttgttctctgtttccagctgtgtgactttaggcaaatttcataacctgtctgagcctcagctttcttctcagtaaaattgccataataatatttgccctgcagggtaatagggactgaggtgtgtgcctgttttaacataagagtggtctagtctggaggataaatgagccgctgggaggaagaagtttggaaatggagggctggtgggagcccggagccttcttaggggacaacaggccagatcaaggatgatgggacagggccaggaccgtccagcccaaagtggctccaactgcccaggacctacttaataggcagatctcgcggcctgggctggtgaggccggcctggccggaagcaagtcagcaagcaggcctctcaagtcctatcatccttgaattatcttattyattcaacaagaacatcctggggtacttttctatgccaggccctgcastgggtactgcagaacaaatctacatccaagctacgcatcctgcttttaagaagctccccaccagcatccatagcatcctgccagagttcccacagctgaaagtgcttgtggtttaggggttggtgtcatcccagttcatgtctgagagagagagagaagtggcgtgtggcagggctgctatgtacagttggatgtgttgtgcactgcaaaatctaggcagcaccatccaccggtgagtctatttgcagtacamaacctgctcaactgtatgcagcagccccggtacaagggcttgtgaatggagatatctacctagctgtacctctccccctggccaggcaaggcctcagtcaaggcttgagaccgtccattgtcccagccagcagggcccagatcacctcgttaaaattattacctcttaaggggttaaatgtgcgccgctgaccrcgtcctgcagcccatgtggagagtttggcccgggatcagtacacattacaaatgagattcagaaattccacctaaaaacaacagcgcggcygtccctgcccracgatgagtgattgccctgtcctggctttcacggcaaatcccagggatgaygcgctttctcttttctgggagacacagccctgtcaccccggggsycacaccctggcyggcagccaagttctttcccagggtgctgggcccggcctcctctgggctgggatcagctgcggcctgactccatcttgagctgggggtgtcaccgagggttccaggaggtggagggcatggggacgagggtgtctcagagactgggagatggaaggagaacacacaccttttctgctccctatgtcgtgaccccatggggcagagatgggctctgrggcatcagascctgtgccctgtgtgacggcgcgtagccccccgaaacagctgctgttatccctccttgaggttatcagcccccaattccccagataccaaaactctcagaagtcacccccgtcacaaagctggtgaccctccctgcagcagctcctgggctcaggccagacccctcagarggcttggtagcattaatggggtacagtctctgcttttgagcctacttcagtgagacacacagggggccccagggaccagtcccggaaacctccctgctcagtgggtggcccctggacagcctgggctggacctgcagtaacgtggacagcattcattcggagctcaaggcctcagccccaggagacgccctgtccatgtgagtgccgcactgcacacccgagattggttttccagcccaggacctggctaggaagggtcggcggggtacagcccgctcagcaccccctgccgtggccgcctctgcaggaggagacagcatggtggggagaggggactgtcttgccctgctgaacccccaggggtcggctacacccctctctacaggcctttttggtgtagcgcaggtgagacaatgcagccagagaggttgggagattacacagctccacatctgcggtgtcaccgtggacgggaccgtcatggtcccagcgggagggtggaaggaagccaaacttgagacgtctgccttgcacaaaggcagtggtgctcgtcaaggtttgggctggaagacttagcacctggcgggcatctgaaaatttccatctcccgtgcctgcttggtccccacggacacatgcctgagccatcagggactgcaaatcacaggggtgggaagacagggacgcacactgagcaggtgaaaggtggtggggggtaagcaggtgtttcggaaggagtagaggagggcccggaatggggccacgtaggaaagggtcacatccattcaccctggagtcagcccgagggcccaggcagggtggggtcctagtgatgcctgtcggtgggtgacatcaggccatccacagcwccgggagccagcagaragggctgggccaggccatgtggacagggtctacggacagtacagggmcagaggtccctattctgggaccttgacatgctgccgttctygtgagcttctgggggactcctgcgaggcatgtgggctgcttctcagacctgcgggtaccccacctcccagatgttgtcaatgggatgtgaggttcacgagcacgtcacggagcctctcccctcrtmatgtacgtgcgcatcatggcaaaatgtgcctggccactggttcctgacgctggaaggcacgaacccactccccacacccacagccggcgttgctgtgactgcagtgtctgtgttctaagccccacttttcacatccatccccgctgcccggccagagagacgtcctcagcccagagccccacttttcacatccatccccgctgcccggccagagacacgtcctcagcccagagccccacttttcacatccatccccgctgcccggccagagasacgtcctcagcccagagccccacttttcacatccatccccgctgcccggccagagagacatcctcagcccagagcttcctatctccctcgcctgctcctaccctccagaataaaatgtgtacgaggtagggaatctgtgcttgtytgccagttgtggtcactgctgtatctcttagagtggggcttacccctgggggcccagcgctcagggatgcgtgggctccaggctggagagaagcacccagatctaccaactggccttccggctctscagagccgcttgcatcttactccttcctcttccctccgctctgcttcagccactccagcccatgcctcagaccccaaatattccatggcctctctcctctcctggactgtagccgtgacattcacttccttctccttttggtgaactcctattcatccctccaagccgatgtcagctgtcacctcctcttggatgccgtccacacgctccacatgcagagtgtgcagctccttcttttgtgctccagtggccccagatgagccccttttgcaactctcctcatactcattctcccaacgagtaatgtgtgtatccctgggggcaggtcctgctctgaggaatgcagcagtgactaaggcrgacatgaacgcctctctcatacactttttatcccagagggtaggagtacacgagaaacaagcataatatatacacggtcagatggtagtgagggctgtgcagagcaggggaggggagtgggaggcggggtgcagcatggcggtacagctttaaatctggtggtcagtgacatttgtcaaagactcaggagctgaggaagtgacccacacagagatctggaggaagagggctccaggcagagggaatggcagagtgcyggagtggccatgcctggggaactccttctggaaagtctgtcgtgaaccagagcagakaaatgcttgtgctggggggaggggtgtcgtgaaaagggaaacaccaggagttgtggcattgggagtttcttcgcttgactttcaattccaccaaacaattcctagacagaagagcctccaggggtttattcgtgcaaggctaccctctgtcaccctgtttgtccttgcttcttatacacacacagaacagatgcacccactggggtcaccccaacccagcccccagcagttgcccataactggccgcaggatcccacacacctgctgacttccagagtcaccaaggggttaaaaggggctgggaacagcctcttagtctccagagcctcccgcaggaatgatttgtgaccctcttaggctgctggtctgcaccttctgaaaagcctttaatatcacygggcacattcataaattattcttttttaaaaatgaaatgttttagccaaacagcagtagaggcatgttgtgcaaaattagcaaaaaaaaaaaaaaaggaatgacgatgatatgaatcttttggcggcctctcctaaccgtctttaaatctgcgaaaggatctcagtgcccgccattacctggccagcaccgggaggatgtcaggtgcttccaggcggactctgctaggaacattccatctgtggccaaggctatcacagtcctcaaattaacagcaaaccccgcgtggcccttgtggtgtgccaggcactcttctgggcatatatatgtattttttatatataaaaatattttttatatatataaaaaatatataaaaatatttttwtatatataaaaaatatgtaaaaatatattttttatatataacttgctcctcatagcaaccctgtagatcattattcccattttccagatgaggaaactgaggcacacaggagcttccaggctcaggtgacatgaattaagaatgcacacatcatgctgggactctgtggggttcctgctgtcatgactttccccagcgaccttggggagggcagagttctactctttgaggcttgacccggtcctgaaatctcagttgtcacttctgcatcctgacaacatggagcacggtccatagcgtaggtgtatcgtaaatgttcagtccatggcagcgcagacagtcatctgcagattcgcgagcctctgggatgatggcctggaaaagggacattgaggacgtggccttgctccagcctgggggggctctgtgccatggccctgcagcagggggcccctttytgccctgaattggctcattcatggcgcctctcaggagtaaaggrgaagaaagtgatggttctccaccaacttcacctgtcccctcctgctgaactccagcagcggctcccatggctccaggagagagaaggggcatgactggcctgccctctcatcagcctctcccctagccctccctcctttactctcatctgctcaggaaaactgagagcaccaagctgcctcatgtctccaccctccccgcagagcaccctccccgcagagcaccctcccatcgcccttttcttgttgggcacctcgttcttcaaagtcagttcaaggttaacccgttggggaagcttccatgacaccagttcccggtttggggtgtgtatttctccgaagctctcccaaaggagatttgcttacctttatcagcctctgctgccccaatcccctgtgcctgctctcccagtggctgagagccccatgaagagccagaccagggccaggtgatgttggtaaccccagcacccagcactgcagccacccacagcaagtgctctgtgcttgtcagatagagaagagagggctctgctctgacctgcaggcctggggctcaggaccccctctctgcactcaagggctgcccgccaggccagcctctcttcccccccatccctccagaccttcattgcatctgtagaaagaggcagagtagccttcactccggaaggcagagggcaggacttggcccctctggtgtgcccacgtctttgagtgaagttggcaagacttgaactcgtcctgcccttcgtggccccctcaccttgggggattgcaaggggttcagtgtggctggggcagtgtgctgagagctgggctggacggggccgtgggcctcagcaagatgcgtctcacctgctgtgagcccgggtgggggtagggtgagaagagccccctgcagagccacagtgggcccccacggttggatttacctcctggctctgagcacagtgggaagaggcatgggaggggtgaaaaggaaggtggtacaygtgttcaggtagatgcgacgaggccggaactgaggccaggtrgggttgtggggagagaagggaggagagtctggagacctttaggaatagaatccattggcctcagtgatggtttaacctgagggatgggagtaagggscctrtcgagggcgactccaagttcctggcttgggggtacctgcctggagagtgaggggtaggggaggaagggaagtgggtttaagggaggagggtaggtcagtgtttggcgtgcttggatttgaattgtccatctgggaggggcgtctggagaaattggagtggactccgagtttgggtcgggggcccaggaggaccccacccagcaggtaggtgggtggaggctgaggtcggctcaggagacacacggagggaggggacatgatttcttatccctctagtctcagtcacaagttcacttctcctaaaaggaggtgcctcagacagcagatccttccagaactctcccagaccttgtcttcctttggcaaggccacagagcttsgtggaaggggcagtggcccagggtctgggctccagttctggtttactgcttgctggccgtgtgattgtcagcaactcacgtaaccacacagagccaaattttctccccggtgagcccccactgcctgcgtttgcgatgagaggagagacagtcgatgtgagtgagctctgtgatgacgaagcactgcagaaatgttagttcccacgccacaggtgaaggctgaagggctttagtccaaagctgacatttcccttcatatttttccccaaggggaaaggtgcaccctgaaacgaagagctgtctctttcgttcagctaccttcagctgtcccctccaaactgtctgatttagctcacgggagacctgcggaaggagcacatttataaccatcaagaaatacggatgatgagttttgctgagacatgttgactgacacttagtattttaaatatgcagcccagacacctgtcccccttgcttcccggcttttatggcgtttctcagccaagcagagaagaccaggtttcgggagctcagtcccttcaactgcaccaccagcttctgatgcgattctctctaattgctttctgctgtttttgccgtgtgtttatgactcagctaagggcagtacagtcgggaagtgtcctgcgcgccattttgcagacaggaggraggaagtgtcctgcrcgccattttgcagacaggaggraggaagtgtcctgcrcgccattttgcagacaggagggaggaagtgtcctgcgcgccattttgcagacaggagggaggaagtgtcctgcgcgccattttgcagacaggagggaggaagtgtcctrcgcgccattttgcagacaggaggraggaagtgtcctgcgcgccattttgcagacaggaggaaggagatgtagtgggatgggaagatctgggctctgaggtcagtcccmgctggacggaaacctgcggccctgttagctccgtgatctggaagrtgctactagtagcgcctcatttttctccccaggagaaggagggcgaccgtgtctcatccctaactgcgatgggggctgaatgcggctgtgggcacatagggtctctctgtctccacccatgtctcctgctgtgtggcctctttccagcccatccacactctagttggtggctttgtgagtgctgacaatacttccatgtgcttttttgttttttcttttttgagacagagtctcgctcagtcacccaggctggagtgtggtggygtgatctcggctcactgcaacctctgcctcccatgttcaggtgattctccctgcctcagcctcccgagtagctgggattataggcgcctgccaccatgcycagctaatttttgtatttttagtagagacagggtttcgacatgttggccaggctggtctcgaactcctgacctcagatgatccacccaccttggcctcccaaagtgctgggatgacaggcgtgagtcaccacgcccggccgcacatattctcaacgtttcctctttgccattggtctgtgctgctcgtcctcgcctgcaggaamtgtggagcctcttggggtgaatttactgaggcctggtgatkgtttgcttcttcccagttgcctgcggtgcttgtgatgggcaagcctgyttgggtctcctctgagctcctggcctctctgtttcagcaccttgtccacacagccctacacttcccttcctttctgctcatggctggccccacatggtggccacagttaatttccactggtatgagatattgtgcagtctcttgattcatcatctggtttgctaaaatgctctttgacagccctgcacactccattacacgttgtcagctagaatcacaagcctcacgttggaggctgcactttagawgggaagatgacgtgcccaaggtcacacagctggtcgatgcagagccacctaggaactcgaggctgtaactctaggtctctttataaaccagtgtctagagtcagagacatgagactcaggcagagagaccccccccaccccccgccactgactttcatcatttsaaacaatggagagacaatcaagtgcaacatcaaatagcaggagytgaaagatggcttcgagatggggccgagaatgtggaccacagagcccaagaggcagcgaaggtctccccactgcacccgagcacttcgtgttcaggatcctggatccccagcacatcagytgcaacttacagagcagagccaagacatgaaagtgaagcgcccgaggggacctacatttttcaacagggagaaaaaaagtgcttaattatatctttaagaggcacagacacgccaagggataccagcagcgtctgagacctgaagcagaaatgccagggatgaggatttggaagattaacacaattgaactcagcactgtggcsttttttttctttctggggcttcggaaaggtaggaggcaaacaccctggcaggtaagacagacaagccaggtgtgatggaaatgcacctctttgtcctgccttttactgctggggtggtccttccaaatgaaactgctctcrccyggagccttcrgtggctcccctttccttcaggacaragtgttgtcttcgttcctagattgtgaggcttcagggactgattttccttcttccttctctccttccttcactctcttttcttcttcttctgccttcatcttacgacgtgttcatggcagaaggcctgccatgggcctgccagggcctgggttggggatggtggggcagaaatgagctgacactgtccctgaacaaggaggccgactgtgagcgtcccctgcaatgagcaggtgcagtgttgcagtggaaagagaccaggtgccaggtgacatagggggtccagggaagacttctgtgaagacttctatgaagcattccagctggtcccagtgtctggcacatgagacatggcaaatcagagtctgtaggatcaagtggatggatggaaccaggcccctggtggcagctctyatgtttgygatsctgcatgtgggcagcgagtgttccttgctacttcttcctccttcccttgcctccctgtgttagagaagttggtggtggttctgaaagaacagtggtgtagaattcgtgatggggaggcagccaggaaatgacccagcttcttggttctctgagactgacgaagtgaggtcctggggcagtccccaccagatgaggcacgtggctcagcctcatctgcctgcctctccccaagattgacaccgttcccagaaccggcctgaaacttcatatttttgggctttgcacttgtccttcctgcttccttggctcatatttattcctcaaaacccaatttaaagcttcctgtttaaagctcctctgtgcagagtagcctctaatggatgggtgggtggattcatgggtgggtagcatctaatggatgggtgggtggatccatggktgggtgtgtgggtggatggacagatgggttgattggtgggtgaatggatggatggttggatccatgggtaggtgagtggatggattggtggatrgatggatggatggatggatggatggatggatggatrgatggatgggtgagtggatagatggatggatggatgagcagatggttgggttgatgggtgggtgaatggatggatggttggatccatgggtaggtgagttgatggattgbtgagtgggtgggtggatggatggatggayggatggatggatggatagatggattggtgagtggatggwtgggttgatggatggttakgaagctatgaagaaaagtggtatcagaatcttgattctgcaggcatttatttggcatctattatgtgccaggaactgaggaccagctgaactgttwaggtcctctttcatgaagtcctccctagccactggcctgggttcagtcgaggtgagggcaaggaggtggaagtcatgcttgaactagcctggagatggaggaaacctgttccccaaaccagagcccaggaaaatgtggctaggctggaggagtgtgggcaggtccgctgacagggcatggcctgggaaagggggtcctgggttgagtggggttgtgcacagactgggagatgcagtgtggacttcaggtcagaggggagggatagagaagcggatttggaaggtcaggaaggggtgcacattccttgagcgcctgctgtgtgcagccgtacagtctgttgttcraccctcgcagcatccctacttgttctaccttaataacttttcttgttaaatgcaaagaacctgagaaaatccaggccccgaatctgaccatcagtgattcagcctagcgcctcccttccccttcacagcacccttttccctagtgtggtccttcctttckagttgctcgtctcaccacgcagctgtttacaatcagcttggagctctggtcttcagccattgtagagaccaaacctcgtgaagtactctggtgcaatgtatttagggacaatcattttctatatgttcagggctttcctctctcataaatcagtccaagagaaatacttaacacctgctgtatgtttctaagaattcagccacgctttggctgggagtcagatcactttaaatattagaatgctttttgatagccagtggtcatttctcagtggaaagaaaaaggatgacatcgagtttgatttgtttctgattttgaaggttgctggggttttttttgttttatttttggttttgttttttgagacagagtcttgctctgtcgcccaggctrgagtgcaatggcgcgatctcagctcactacaacctccgcctcctggattcaagtgattctcctgcctcagcctcctgagtagctgggactgcaggcgtgtcccaccacgcycggctaattttttgtatttttagtagagayggggtttcaccgtgttagccaggatggtcttgatctcctgaccttgtgatccgcccgcctcggcctcccaaagtgccgggatcacaggcgtgagccactacgcccggccaaaggttgctgtttttaatccctgttcatagaagaggaaattgagactcaggaaggtcaaataatccatctgggggtcctaccacggagccaggtcagttygtatcctgcaggtctcaaagggcctacttagaacgtctgtggcaggtccctgtcccacatggagctcrctgcatgagcactttcttctttctttctctgtccccagactgacccctgaggacagaccttcagtttctctacattcttatttagccagtgccaggcacacgtagcatgcgcagaccctctgtgcattggaactgttgataatattaatggtcccacatgcaccaggagtgtgtatttaaatatagacatttaagataaatatatamatatatcaacataagaatatgataattatatatacatatatcaacataagaatatgattaytatatacatatatcaacataataatataattatatacatatatcaacataatataattatgtacatatagcaacataatatgataattatatatttatcatgtttatattttatatataaattttagagtaaatgtaaacattttatatgaacaaatatggatatttatatataattatatttacatataaatacacttatgtgtaaatataattatataataattatataaatttatatgtaaatttataaaatacactttaaactatttaaaatacagttatataaatttgacatactttataacatatatttttaatatattgttttatatgtataatagttatatatcatatatgaaactatataatatacagaaatataataataacagaaatagatctctttttttttgggacaggatcttgctctgtcacccaggctagaatgcagtggcacaatcttggctcattgcaaccttgaccttcccrggctcaaacaattctgccacctcagcctcctgagtagctgggactataagcacacaccaccatgcctggctaatttttgtattttttgtagagacrgggttttgccacgttgcccacgctggtctcgaactcatgggcttgtgatctgcccgcytaagcctcccaaagtgctgggattacaagcgtgagccactgcacccagctgaaacaaagacatatctgactgttgcttgwggaggtgcctgccattcctccctacagtgattcacaggctcacccagcctctccttctccttcaagccccaaacctctgaatgccaggaagggtggtaagaagtgtctctgcgcctagtaccagtaaagttggcaggtcactgtggctagcgggggcaccattgttggcctcgggcctggggagagaaaaatatgacatacagggggcccacgggggtacgttaggttcagccctgtaagcccacactgaccctggtgggcagacccagcccagggaggggcaggcaggagtgaccccgtcatcaggttctgctggcgagcccagggtggtgacaggcscacgtcttttgccgggagctgaagacgttcatgggctttcaagcaggacaaagcttcaatgtcatcaccaggtagcaggcagagcaagggtgctgacagcctgcagaagcctgtgcttatctctccatcggagctaaagcccatgtttgcttagggaacagcctgaaattccaccccagctgctgggcctttcacttttgaaacataagcccagagagcgaaaggggggaacgttgtgcccagattctctttctgagcgtgaacttgatgttcctgaccaggaaccagccactcgtaccgaaggccttyctgacccctcagttctcccctgagcctttgctgtgtcctgggcaccaagaggtggagataggctgtcaccgtgcacgtttcctaagcctgcagaggaactgttcacagaatccagcctggaatcagccgtttgtggcaaacagtcagtagctatttctcaacktgtggttgtgaagctgcaggctccatattcgctcttcacagagcatccaagcaggtgtctcagtgccagctcacaccgttcacactgctcacaccagctctggagagctgcttgtacacatctctccacaagtccactttcagtgwtgccacgtggtaccggaaattkgccatagaaattggccgatggtacgaccagagagccacctgttagatagttaccccacatccccaccctcaacaccaccttagacaaatcctactgtcagaacatgtggaacggagaagggaccttggcggttcattcataaatgtcagcacccataggtctgtgcctgtttggccgcagacactggggagcagcctgyagccttggcttgtgcagcttcctctgcaggaggggtgcctcttccaagaaacctgtcctgactccccagccctccccacctccattctcgcccccgctggacaatgcacaccctycatcagagcgtggygcatacctttcatcctagatctcccaccagctttgaaaccagcatcctgttcatgatgtctggaaccctgggaactgtcccagcacctgttkagcacatgtgtgcatgcgaaggggatctgctgagtgctctgctctggtgggaaggccrctctgcacagctggagctgatgccttggcagatgctgggcatctgaatcgtgcagtgcaggagcacaggggcatggcaccgtttgttgctggggaacctaggcctcaaaagggcctcagcctctccgcagtgcagtgaggactgtcccatactctcactgcgtacagagtatgggagagtctctgtgaggctttgggtgccctgcagagggaaggcagtgccagctgggcctggtygggggccatggagatggcgggcccaggctggggaggacttgtggcacccactcccttacccgcyaacccggatcccctggaatctgcagaatgcctggggttgctcctcttctaccctgccgtggctgagctttgtctgtgccctgtcctctggccacggtctttgcctgatccctaccctggtacaggcagagctccctgcaacccccagctgtttccccagaactgacaccagtctccctgcaccacccatcctccttttgactgccctggggacgccactgctgctctgatcctctgtcactccagccacctcttgcttccctgttatcacaaacactgaacagtgagctcaggtgtcagcctccacagaggcatgcacagcaaggggtccggaggcatgccccatggagaactgggggtgctctgcttgcaggaggatccagggcccaytgcagtcctcagatgttctgggggagaggatacgcctgcttcatttcttctcaggggtcagaactgggcacagggggttggaaggagggagaaagatgtctatcaggtacccactgcatgccaggccctcttctaggctcccttaaaacctttcaggtaggccagtcacggtcgctcatgcctgtaatcccagcactttgggaggccaaagcgggtggatcacctgaggtcaggagtttgagactagcctgatcaacatggagaaacccygtctctactaaaaatataaaatgagccaggcatggtggcacatgcctgtaatcccagctactcgggaggctgaggcaggagaatggcttgaacccgggaggtggacgttgcaatgagccgagatcacgccattgcactccagcctgggcaacaagagtgaaactcygtcgcaaaaacaaaagacaaacaaaaaacacctgtcaggtaaatggtggtagagcagaaaacctgggctcagaagctggcattgatcccagagccatccagtttcaaagcccacacccacaactttcctccaggttgggcagtgcatgatggaaaggctgtcccagcaagtagtgagttcactttcaccagtccctggaggcaggagcagagcctgagctgaccacttggaaggagatgttattcaggggactcgagcatctggcgtaggatgggactccatgaggtctatgcctccttctagctctgaaactcctcragggaaaccatttcccagatctctacgttgctgcagtcccttctaacttccagcacaccttctgctctctccgcaggtgtcgtgcgccaggtgcggcccatcgtgggcccatttcatgccgtcctgaagctggagatgaactatgtggtcgggggcgtggtctcccaccgaaatgttgtcaaygtccrcatcttcgtctctgagtactggttctgagggctggtctgccgcacagccgcaggtgcacctcsaggccaaatcattgctgccagtgactgtggtctgtacttgtttataccctcagacttttttaatgttaggtatttgtagcattaggccaacatgtattaagctgagccagatgaataagtccatctgatgtattttcggtgtttraaaaatgagcccagttgctcaactgtttrgttgaaaaccttgctcattttttaatgcgaaggctaagtgtcaccccctttctctgcctctggctgggccttgctaagggccaaggaaagaaagacattttttagggggcagccagtccaaatgccaaaagaagaccagttcttgccctgattgtatgaaatttgacattttggcactttttttttttttttggccaatcagattttctatgttctaaggacatggctgctgtagaatagcacagaygtggatgataaattatccccagaagcagcatgacagaatgcctcggggagcacwtggaagggaaattgcagttctgttgaaatagaggaaaatcccttggtaaaracacagcctgttaggctcgtgtgggcctccagtatgttcaccaggggaatggctgggatttctcggcactctgcatcatccatcttttyttataggtgggaaaataaacaactttgtgatcctcctgatggcctgtgcatgagagtctttcaagaagagggctctctgccagctcaggagtcttccgccagctaagggactggaaatctccccccgccgtccccctgcctcaccccacccaaggttgtctcartgctcctcctgcccctcaaggttctggggcggggcccagcttgtgtattggaaaagcttcctacacacgtcgttttcaatgccatgcccaccctctgagaagtgtggctcgggtttgttccctgccccatgtccagtgctgctaggaaagcccagggctctggcttctgtgtgacttgcttccaatagcatccctcgtggcatcctgatcctctctagaaatccctgggggcaaataatgacccttccgcagccatgagtccctgccagacacaggcctgggccaggcatttgacatgaggtgcttcgctcatwcctcctggtggcccagtgtggtgggtatgatcacacacaatcttgagatggacaaactgggctcagagagaggaacttggctgccaaaattcacacatttgagagacaaagagggaattcaaattccatttatctgaatttaagccctctctaaaccctgtgtcagcaatagatatggacagactgaatttgttgggggactgacaccccaattggcatcagtggcggggccaggggctccctgtgccccagggcccactccggcctccagggactcagcatccaggctctgtttccacacacgcctctcctccaaatccttccctaggttgatcccatcctcttaggtatggaccccatttgtggctcagaacctctctcatcctatgcctcatttcgcagcctggaccctagcactgggtgagatctcagccccacactcaagccaacaccactccaactctcaagaacatggtctccaccacctttaggaagacctttccaaggtcacttatttgggtcactggtccatcaaagccaagcctgggccagccaagtacaaggcctgctggagccwtggccgctgtagctggtgggaaacaagaggccaggtgtggggctggacagtccaaggagccacatccggggacaaaacaagtgcaggggacatccatgcaggtcttgatgccagggagttagggaattggggtcctggcagggaagcagggctgggagctggctgcaagaatgaaaggaagactcasggggaggggcaggaaatagaaagggacatgtagggggagtgctgccgcccacttgcagcctgggggcaaatctgccagagccaggccgttytgggctcagcaaagytggtttctgggagccttyttcagtagggtggggtgggaagaccraggtgcaggctgctttgggaaaagagtttcccataytcctaacgggagttagggcaggccaggtgcagtgcctcacacctgtaatcccagaactttggcaggccaaggcaggtagatcacttgaggtcaggcgwtccagaccagcctggccaacatggtgaaacctcgtctctattaaaaatacaaaaattagctgggcatggtagcgggtgcctgtattcccagctattygagatgctgaggcaggagaatcacatgaacccaggaggtggaggttgcattgagctgagatccactccagccggggcagaggaatgagactgtgtctcaaaaaaaaaaaaaaaaaaaaaaaaaaaaagggcagctracatgggaagagtgaatacagagccaagccccctgctgctgattggcttytgaatgagcacatgatccaagctgtccaatcagagtcctgcctcagagagcctgcsgtctggagcagaagagggcaggaggggcccgcaagtaagcggtgagggcgccaggttgaggagcccaggggaatagagggagtcctgaccctatctgattcagaatcagggaggcaaaggcagacctctctcggcagggctagcagggcgagtcactgccatcgtccgagcttcagtttccacatctgcaaagtggagattcccagatggcagtgaggagcgctggagarcatgagtgcaagagggctttgtgcattgcaaagtgctgcatccgtgtgtgayggcttattatcattaaccgttaaaagcagcgatgacggtgatgacgataatggttgccactgtcaatcgagccacatgaacgcgctctggaagcttggcatcttttcaatccggcatttccttttcttaatcatcctggagagacttggtagacagttgtgtaaattacccaccagcttaactcttcatatttcatatcatgctatgggttgggcacctgatggacccataagtatctcattatacttgcaaagtaattactgtcagagcctcgcatcagcggcattaagggaccagctaatgggagctggaggtgcctctgagttcctccacaacagtgattccttcttaattgtagccttagaacaagataactgagggacattgctaaaggcaaagcagtttataagcagcatgagacagcaaaacacacagagacaccaagttgaatccttcttgttgatctggtagaagaaacttggagggaaggtcccagaaggtgtcatagagtggtattcgaccagaaagctgcctgttttttttttttattcctaagggacatctattctactgtacagaggaagtctgtggcatgtgtcagaagtgcctgggctgcccagggtcctagcaggacccgttttaacatgcargtgggcattgagtggagggtgccagggcccacccagccaacccagccaagccagccaactagaattcgaggaggtaagccagcttttccaaagttctcaagtttgtccaggtgaaaaaacacctggaaatcaagggtttttttcctaatattgtaacatgaaaawtttcaaatatacagccgagttgaaggaattttacagtgaataccagggcaccttccacctagattctgccactgacattttatgagattcagttgcattttgaagaaatgacaatatgatgaattaataaatacaaataagaaacttacagtttcttgtaggcttgcgctcaaatccagccacttactagctgtgtgtccttgggcacattgcttaatgtctcagagccttggttttctctacaacgaaatgaaaataaggacacatacttcacaggagtgattgttaggatgaaaggggatgattacgtaaaacagtgcaagaactgctacacaggaggtcctccataaatagtactgtcatgacacacacacccgaaaggatagtctttattcagttagatgccacattttattaaagtcttgtgtggacaagaagtgaaacctcagaggaatttatgaagaataattggaggcacttccttgtgacttggcttcatccggaccggatgacttctgggtgccagcaacagttccccatttccattcacgtttccccacatcgttcatgccaaagagatgggtgccaagaggccatccgtcttcatcctggacatagaatgagacgggaactcactcttgaaggacttttgaagtctcagagaagaaacggagccaccgtagaccttttgaaatacggcctgtgagaagcacggtgacagtcaccattactaccaataatcacattactctttgtgggaaaaaagacctactatgtgccaggaaggcttcggtaatcatctccaacacacacacattctctcacacacacatgtgcgcatgtgtgcacacacacacacaccacacacacacacacacacactccgcarcccttctgccatgcccagctcagggccatcttctcccacaaggatgccggtctcatctcctgaaatgaggttgcagtgagccgagattgagccactgcactccagcctgggtgacagagcgagactccatataacctctgcctcctgggttcaagaaactcttgtgcctcagcctcccaagtagctgggattacaagcgcgtaccaccacacccagctaatattttttgtattttttagtagagacagggkttcgtcatgttggccaggctggtctcgaactcccaacctcaggtgatctgcctgcctcagcctcccaaagtgctgggattacaggcatgagccaccgcgcccggcctgatctcagtctttaagagagcagcagctcatctgtggccactgcttcccagggacttgccagaagggaggtgcagggcacagggaaataacccacctctatctgacggcttcaatggtatcgaatgtcctcagtggcagcacgcagcacagaagctgaggtgtggctgcattccatttggagaattccactgtgattcatggtgtcagctgcgggttcaaggtgtcacaatttaattattaaacatcatgaggcattwggaggcttgggcacgcactgataagtgatccatttctaacacagctggtttattactgtttgtggcagctcctgcacgaattggtgtccgttaactaagcaatggtattataattacacatttaaattatgtatgggaagggtgtcagtggtagaagtcagactgcagtgattactttcagtcttcagacctcctggatgtagtctctctgcagatagctgtaactctggcttgttttctgctcattttctgcagacatgtagaatccactgctagggtccactgagctgtcttctgggtggtttttggtgctgcaggagataaacacatgtgtcttcctggttggacccagttgatgcactaacctaattctgtcctttgcctgccctgatctccatagcctgcttcttcctggaaatttgctgctgctgctgctkcttytttttttttttttttttgagacagggtctcgctctgtcgcccaggctggagtgcastggcgtgatctcagctcactgcagtctctgcctcccgggggttcaaaccattctctctgcctcagcctcctgtgtagtgtggattacaggcaccccccaccatgcccagctaatttttgtatttttagtagagatgggttttcaccrtgttggccaggctggtctcgaactcctgacctcaggtgatccasccgcctcggcctcccaaagtgctgggtctacaggcgtgagccaccgcgcccggcyggaaatgwgcttctttagaggaaagcaccgttgatcccacctccttgatctggtttctaagacctcatacaaactgggcccgttagtctttgctccctgatactatctgataccatctggtctcactccttccttcccatcttgttcattcattggttcactcattcattcactcacttcacgccctccctctggtgaatcagttcccctctgtcctccccactctgtccagtcctcccctaggctgccaggttacatttccaaaactccgatctgatcargccctcttggtctcaratcctccaagggcttccttcaagggctcctgcaccaacctcgtggtgtggctgtgtgacataataagaaacattcacttctatttggtctctttccgggttcctgacacaaagctcctaatcccttgtctttggtttaatgaggtgactctcagtggctcctgggtggggttgggggctgagcaccagaaagacccagattcgacgaggagcctggagcttttggctccacccccaccctccaggaaagggagaggggctggagattgagctaataatccatcaygcgtaagtratgaagcctccgtaaaaatccctgaactacaggatccagagagcttctgggctggtggacacatccgcatgctgggagggtggcgccccccaactccacrgggacagaagctcctgtgcccgggccccaccagagctcgccctgtgtgcctcttcgtcttcctgttcatctgtatcatcaataatgtcctttacaaggacattattgtccttgtgataatgaatgaggaaggaattatt

SEQ ID NO: 9844 - DNA, 77477 bp, Homo sapiens
aactaccctttttctgaccacacagaaactaccattttaatgtaattccttatagtctcttgttttttctaggtagagcatgtattttagtttcttgtactaggtagttgagtagtctgttrcctctctgacatcactgcggaaattcatggtacgactgggatgcaagtcctccccacgcctcctcagcctaagtctggctttttctcacttgctgttgttcatggactggcctaaaccaagcattgcctgttagttcctctgttttgttaaaatactgatagtctccatagcatttgaaattagatgggagctatatatcttcctcccaacaactttgctctcttgggtaaatttccatggaattcagtcctagaccaaattctgccccatgtacaaacatctaatgagtgaggaagccaccatatggccatataattctcctcttgattgagaagttcccacctctgcttttgggtacagccaccagcatygggaacgaagatcactccacagcagatacaacatgcttccgaggtcaggaccagttagtggagtagtcaggtcaggagcaggaggaacagascccgaagtttgagtattttcatattttagatatagttttacatacagtaactctgggacacaaatcttaagattaatctctatgagtgtttatatgtgtacccacccatgaaattgtgatccaaatcaaaatacagaatgwttccagtgccctagaaggttcctcatgaccctgtccagtcaggacccctgctgcaagtgtaactaccatccagacttccattgctgtgggttagtgttgcttgttcttggacttcacataaatggaatgacacagcttgcgctcttttgtgtctggcttctttcatttaacattgtggctctgagctccaccctgttttgcatgtagctatagtttgctttttgttgttgctgagtaatattccatcatccaaacacaccacagtttgggtatccattctcctgctgatgggcactgggttatttctagtttagggctgttataaataacactgctgtgaacattcttgtacatgtcatttgatggacataagtgcttgtatgtcccaggagtggaattgctaggtcayggggcagatatatgtttagctttagtggattctgccagtttcccatttggtgttcaatttatatcccctcctgtatgagtctgatcttgcacagctccccacctgtattagtctgatctcgcacagctataaagaaatacctgagacttggtaatttataaagaaaagaggtttaattggctcacggttctgcagactgtataggaagcatggctggggaggcctcaggaaacatagaatcatggcggaaggggaaggcgaagcaggcacatcttacatggccaaagcaggaggaagggagcaaagtgggaggtgctacacactttaaaataaccagatctgagaactcactatcgtgagaacagtaagggggaaatctgcccccatgatccagtcacctcccacccggcccctcctctaacactgggaattaaaattcaatatgagatttgggtggggacacatatccaagccgtatcagagtatagttgcttcacatctgtgccaacacacagtactgctggtccatgatgtttgctccagacctgcttgttgaatgacttccattaagctccactgtgcagccaggcttctgttatcctttacagcactttctggctttagagggagaattatgaactgccaaggtgcttttcaactggggaaccctgattgagaggatggtgaggggggagagctccctggagtggatttgctgctgatcctgtcctggactccagggcatgtatgcacctggctgtgcagcccaggcctctcttggcacccacttctgtactatggtgccacccagatccctgcatgggctgtttgggagatagggtcacactgggcagtcctttttagttcagagtaacactacctttcccacctcatcctcctcatcactgtcattgggctctgagggacccacttttgctcgaggattgcttttttactttctgtttttgttttcttgagatagggtctcactctgttgcccaggctggagtgcagtggctcgatcacagctcactgcaatctctgcctcctggggctcaagcgattctcccccctcagcctcccaaatagctgggaccataggtgtgtgcaccaccatgcccgactagactaattttggtattttttgtagagatggggtttcgccatgttgctcaggctggtcacaaactcctgggctcaagggatccgctggccttggcttcccaaagtgctgggattataggcgtgagccactgtgcccggtctgagggacccacttttgaatacagaccccagcctgtgtcctgaggtgttatggttaccggtggggcagaagggacccctgcatattgcacccattttgtccttgtccactggctgttgcccaaaattctacccttagtgctttatgcttttacctctcaagggcatgatacttagggacttggcagtgaccctggttagagtgggcctgttttcctttaaatgaccggtatcccagtgtgaacaaaggatrtgtgagcaggttttgataaggcaatacagcaaggacactgagtccttgaggggaaggtttaaaaggagatgaaaagggcctacttgctgttggctgaccttggtgccacagacgcacatttcagagtcatcaaggatgaaggctcagaagactctgaagcaacttcaaaggaatcgcttggatcacaggtggggtgaaggttggagataagaaggcagggccagggaaagagacccaagggagcctcgtttggaagcaaagctctggaaacaaaagactgcagagccagggtcaacctgggcaactgtttgaagccagccccgtcctcaggtgcaagaaagagcattctctgggtctaagcctgagttgtgcgcggaggacacaggctttcctgggcaggactgcaggcttctggctccactcgtgcctgtggcacacacaggttttgatagccagagcctggccagtcctcctctttctgctccctgtccctcctgggaccaggacttggcctctcccctccaccctcccttctcttcctccttcccttctttgtctccttctccttaaattttgtgatttttaatttcaattgatttattgcccctccttgtccccagcctcccagttctcctccccagaggaaaccagtttcaccagttgcatgtgtaagtttccagagacactttaatctatgcacatgagtgatgtgtgtgtccactttttctatacaaatggtagcatactttttatagtgttctaggcctcatttaaaattttaaaattaaatattgagtagatacaaaaatagtagttatagaatatatatacattttaaagacacccacaatacaatagaccagtatgggtacccacgccctgttttagacaaagaagctgggcttttgaaaccatgtgcctctctccagccccaccctcctcttcccctaaatactatcatgaattttacgcttatcctgccctttttgtctttttataatcctactacttgtttataatagattatgataaatatactatatttttatactaagataaatgtaataaacattatatataacaagacataaatatatataataattgaatatggtatactacctttttgggattatgaatagaatagttttctatggctggcttttgtcccacccataattatagttctgaagttcagtgtactgatacgcatgtccggagttagttcattttcactcttgtatagaattccattgcatggagatagtatgattattttcattggactattttatttattaataataattattattgttttctaatttaattttattttttgagacagggtctcattctgttgcccaggctggagtgcagtggtgcaatcatggctcactgcagcctcaacctccagggctcaagaaacgatcctcctacctcagcctcccaattagctgggactacaagcatgagccatcacacctggctaatttttaaaacttcttttatagagacaaggtctcactatgttgcccaggctggtcttgaactctcaacctcaataatcctccggcctcaggctcccaaagggtggctcatgcctgctgggattacaggcatgagccactgtgcttggcctcagtgctggcctcagttttggggttctaggaacagagctggtgcaaatgttcttaattgtttcttttggtgtgtgttggggggaatggcgggggttgggtaagaacttctccagggcatttgcaaggccattgggaaagtacattgtcaacttcagtagataatgccaaaatttwaaaaagtggttataaccattcgcacacccactagtagtttgagcattcccctcactccacttcttcaccaacacctgcaattatcagcttttttttttttgtagatggatctgtgtgaaattgtaactcactgtggttttagttttcatttccctggttatgcatgctgccttttttttacttaaaatatgtcttggtgactgttccrtatcagagcagtgaggacttcctcctcctttcttggctggaaagtgttccatcgtcatatggaaatcttgtggtcgatttaacccgttccctattgatagacgctgtgtgggctccagccttttgcagtcgactctgcgatgcataacttcgtgtatagatagcagtctgcagctgcacgtgggggtgtgtgcatgtaggtttttcacaggaacctcctgaaatgcttagaagaaaaggaaagatagtgtttgctcccccggccctgtgcctccctattttcaacaaattcccttaattccatgagtgccccagggtcagaatggtatccaccctgtcctgtttgcaccgtaccatctcttctctcagatgatgatgttcatctcccacccgcttcccttcgagccacccccacctcatagactcctcaggaattgtctctacccggcatctctcactttttyttttcttttttcttcctttctctctttctctttcttccttccttcctttccttccttccttcatttccttcccttccttccttcccttyctttctgtttctctctctctctccccctcccttcctcccttccttttctttccttctttctttctttcctttttttttttttttttttgatcagggttcttgctctgtcacccaggctggagggcagtggtgcgatcatggctcactgtagcctcaaactcctggactcaagcgatcctcttgcctcagcctgccaaatagctaggactgcagctgctcgccgccatacccagctatattttttgtagagacagggtctcgctatgttgccttggctggtctcaaactcctaggctcaagaaatcctcccccctcagcttcccaagtcactgccagacatctttcttattgacatccccatctcgagaatccaagttagtattaactgagggattagactttgccttgccctgaaagagagaaaaacaaactgaccaccactctagagactgtttagtctcaaaagtcggcgcagtaacacacacacacacacacacacacacacacaaccaaccaaccaaaaaaaaaacaggtaaaggcagacaaattccaacccatcccctatgtgctgtgccctgggcaaaccctctgacatccttcagactcagcttcttcctctatgaaaagggacaataacacttacctcttgtgggtgtggggcagatgagggccaatgttaataaaccactcacattcatgcactcactaatcaaagctttcattgttatcaaggataattctaattcaagtaagctatgaagatggcatgacagacacaaaatcagccagggggagcccacattggagggcagtccacaatggaaggcttcttggaggaggagatgattgagctgcttctactaaggtaggcatcgtttaggcaagtgggaaaatgttcatgaatgcatggtggggggtggtgcgaagattcttgaaggagagatctacaaaatcagaagcatggagagtgagggaggaaagatttggacatgtttgggaaccagtgtgtaactggggagagatgtggattgtaaagggtgagggacctactgcctgaraggtggcaagagctccatctttgacaactcagtgggcaaaacaaagtcctggggtgggcccaggaattggccctgcaccagaaattcagatgcrcacttgtgtttgagaattgctattttcatctgaggaaggaggtgcagcctgggataaagggatgtggggttcagtagagcaggaccctactaccagagagcccagcagttagtctgcagggggctttgctctgggaggaagcatgggggctggtatcgcatttgactcaagacactcacctcccccaactctgctttgatgtggtatcctgcaggcatagggagtgccatggactggtgcctggggaattgcatgggaaaggaaaagatgaattgcatgtgccctccaggaagtttggaagctggtctggagagtgtgaagccagggctggctaaacatctacagcaaccatttctagctaagagctttaaactcattagtctcaatctcccaacagtccaggtgggttggaggcattatgtaattgtcatgcccctttcctgcacagattgagccccagagaggttgagtagcttgggcaaggtcacacagctgggaagcagtggagctggaattcacaagtccgtctgattctagagcccatgcacagcgtttctttctctcccttcctcttccacctcctttttctcctcctcctccttcctctctctctctcttagataattgcatttacatggtctcaaaatcaaagggtacaaaaggatatacagtgataatcctcttcctactatttcccagttttccttcctagagaaaagtaagggtactagtttcttgcaactagctttagaatattcaattcatatataaatgagtatattccatagatattcttccccattttttagacaaaaaaaatggtggcatcctatatgtactgtttggcactgagggttttgtttttttttttaacttagtatttcttgatagtctttccctgtcagttcataaaaagcctttccttattctgctttattatctgcatactcaactcatcctctatttggtggatgtagagggggctcccgaccttatgcagttacaacccattctgtgtgagcatccctgacctcaggtgcagaaggcatgagcagcacatctgtcagataacacatctgtcagatgacaccctagaaggggagatgctgaacacacttggtgccattcgttagcttctcctcaaatctgctcacagacttaaccataacgatacttctttcttctataatctggctgctccagcatgttcctctgacagcactttctcccacagactctgttgccaaacttgggtctgcccaccaggtgcagcaaagccaagcactgacattgggatttgcagcaagagaaagtgaggcatttactgcagggtgccaagcaaggagaatcgggcagctcatgcttaagccccgaactccagggtggctcacaggtaagggtttttaaaggcagggaggcagaggttacaggcaaagtcataaatcaatacatggaaactgtgcattggtttgacctaaaagggtgggacatctcgaagcggggcccgcaggtcataggtggattcaaagatcctctgatttgtgattggttaaggaggcaaagctttgtctaaaaacctggggtcagcagaaaggaatgttgagctctggcctgtgggtgtgacttcctccaggcccctcaggaagaaatgttgaacaaagaatggtggtctgagttcagtcctcggctcccaactgaagtctctgtgccagtggatggcattttccatttgctgggggcctgggtttctgaaaaacaactcaggaacatatattaagatgttatcttaagtttcaatagggaaccaagtattttgtgactctaacttccttggctattttttttgaaaagctattatttccttcttgcttatcatgttgttcatttactctcagggctagctaggtgcctggaacttcccttgaaagaactcaagatgttcctttatttctatgcctggcgagggagttatgcctggcaggcccttaaactctgtctcaactctggctatcaggatgctggtcctgccttccaggcactgctgcagggaggggtgggtggctctgcccctgtgcccagcacacagtaggtgagtactcagcacaggggagctgcatccgctcttctgtggcattgtcatttatcttcaaggagcatttcctcattcagtcctcacaacagccttgtgggtacctggcaggaaccgtcatccccacgttacaggtaggcaaacaggggctcagggacatcctgatttggccttggcctcattggctgaggaggaaacccaggctccctgactccccgcacagtttcactccccgccccccgccacactgcctcccagcggctgctgaaatgcaattagccagggagggacctgcttttcagctttatactgtctgttattccacacacagatatacgaatggcacagggccatctcagcctgtttttgtttgccaacaaacatgaraaagattaggatatctagccaacattttgtgagtcctcacaacactgcaggcaggtctctgtgcacatacacgctcatctacttctcagaaacagaggggtgagggctggtatcacccctgctgcacagatgagggtaatgagtagcagggagcagagccagggtttaaacagatcccacatttttggwtttttttttttgacgaggtcttactctgtcacccaggctggagtgcagtggtacaatcacagttcactgcaccctccacctcccaggttcaaatgattctcccatctcagcctcccaagtagttgggattacaggtgcgcccaccaccacacccagctaaattttgtatttttacatgttgcctggccatgttgcccaggccgatcttgaactcttgaactcaagtgatccgcccaccttggcctcccaaagtgctggaattacaggtgtgagccatggtgcccggccagatcccgtgtccttaactcctcctatcaatcaattacattagttatatgatactgataacttgtcattatcagtataattcaagcctctgctgaaatggtggcatctacttggtatgatttcagagacaacaggaaggtcctttatgcataagaaactagacgctttcccacccagcttcgagtcactcacaattgcacaattcgagctccrtccttttgccacggctttgagctctgttgaaacaagatcctcccaggtgtttctcagtcttctaatgctcaggcctgcttttcatgacataaacagctctgtccctttctgtagttctaattacaaaaacaaaaggttcttcccacacgtaaaattacatagtactcttaaatatgtcttcttgaacgccatcgccccatcccagactcaggaccagcctccccgcgctcactgctgtcactgctttccgcactccctgcggattttaggattttagctcccatctcgcgtcctctctccagctcctcctgccccctgcctggtggtttcaccatccacttaccagcccgccgatggtgccctggcctcccagttctttgacctcctctccccagtgatcttccagggctcggcactcagtttcctggtcaagcttgagccctccagagaagccactgtcaaacctctttccggctcgtgccttggagccatcgcccctcagggccccacagactactgacctcacccgctttcaaatccctactccctcctttcccagcctaaattccagggttagttattctagtccctaccttttctatacccttccctccacactccaagttggactgtacttgcttggcaaaaccccaacccagttagatccagttctccgccaactctgcctgctctactgtgtgtcttacttgcttattttattacctctgactccctccaccagcatgttgaccccacggggacaggggctatgtccctgctgctctgccctagcagccaaagaatatctggtacatagtaagtgcatattcattaaagtgtatagtcgatgaatgaatttttctaggtgtggagaaagatctgagagcaggtttaccatagtatctggggaaaaagcagaggggggacgttgtgttgtgtccaagggggctagaggagggtcaaggaggaaggcataaggaggccaagcccaggggctcctccagtttgcccagagaatgccaccattctttcctaattagctccttttggtctgggagaagctcttagaagagtatttcattctcgagccctaatcacaggattctgaacccttactaaactgttgcttcctgcagtcttggttactcagggctcccgagccaacgtttggatggctgtgattatctgggatgtctcaggartgacctaaccacttacctcttccaagttctgaattttacaacaggaaattgaggcccagagaacagaaggacacatgggtgctgctggtagagcccgaactggaacccagatctgcctccagtcccgggctcatctgccaccgtgtaccatgccctctctctgttgtcacatgcagtcacttgcccgattgtccacacccttaaaagaagcagagaaaatgtttggtgtaatccacaccgaacactcagatgaacaatgctgtgggaggaagggaggtgatttaaaaaaataataataaaataaaagaaaaatgcagtggagaacagatataaggattcgacaaggctctggtgaacctgcaaaacttgcttcctgagcgacaggacagttctcagggccctgcatgtagcacctcatctactcctccaacagccctctgagggaggctctgttattattacttctattttattgagacacaaggaaattgcgtaaccacacacattattaggaagtgacacagcctaaattcaaacactgcttcactcgggctcgtgcttataaccttacctaggtgtcttaaatgccacaccaaaataacttctcatttttttttttttttgaracggagtcttgctctgtcgcccaggctggagtgcagtggcacgatctcggctcactgcaagtgcctcctggattcaagcaattctcctatctcagcctcctgagtagctgggattacaggcacatgccaccatgcccagctaatttttgtacttttagcagagacaaggtttcaccatgttggccaggctggtcttgaactcttgatctcaggtgatccgcccacgtcagcctcccaaagtgctgagattacaggtgtgagccactgaacctggccaacttttcaatttaagcaaacgtccccccaccaaaagattgagtcctattgagaagaacttcatcttctgaaaaagggggggtgtgggcaaggtcggcactgcttgttgcactggatgctggctgcatatctgccctagagaggcccaayggggaaggtgcagaggccaggggagaggtaacttgctcttacagagtcccacttcatgccaggtgtttctgtccattagtgctgcttagtttttgctaggggcctagtcatgggatcccacagctaggaggtggtataacctgcatactttctcctcctagagacttcccaaggcttgtgttacacaggacatgagtaaacattactagtaaggcatttctgggtcatgagcttggggttggaagtcatctcggtacatcccagctgaggctctgaccttacattcttccttttatttcctgagaactaaaaaatattatacacactggagtttccattgagatgaataaaagagttggaaccagcttatcatcaggttttgactccaaaaaaggaaacagcttgttctaatttrccaaaccttaagtcaaatacagttctatttttgaccgaattgtccacaggattccaaatttgacattttgtctttttaaagatgagtgaactgatgtggagtttctaaacagaggatkcccagtgtggcagaaaataaaacaatggcctgggtgttgggactcgtaggttttgggcctggctctgacttagggttgtggtgtgacttggagcaggtcaccagccatctctggacctcagcttcagcaccacgtaagtgaaggatttgtgtatgatgagctctaggctcccctgagatctaactaacgttctaggatagggacatgggctctggactcagaccatgagagtttacatccctgtttcatcacttactagctggtaagtgaacaagttggacaagttgcttaactactctgagatccaatttcttcatatgtaaaacagagattgatattacctctgtcctaaggttgcaaagatagaagaagaaaattcatataacttgcttagcacagagttccggatgaacagaaaacgtggtcaatagtggttagttattgcaatgatgagggttctttatatgctactacaaataaaggaagaaccagaccataaaaatctgagcctccactaataaatatttattaagcacatactcctcatttgcagtgaacgctttcggttggctacccaaaccattcccagccccttccttgtcatctccaaccacagagatcggaaatccagatattctctttcctggccttgttctgccatgtgatcatgctttggctgtgagatgcgagctactgggtggcttctgggaggccttttgttcccggctaaagcaacagtcccaagagaagagccccctgtggtcccttctgcttctctcaccttaaatatgaatactgtatgttatttggagatgtggcagcagtcctgtgatcatgaggcacagtcacaggaaggaaagcccaaaagctgagaatatcatggtgtaaggctggaaagagcctaggtgctgggtgacattgctgagcagagaaaccaaccscagcagttattgggtgttagattttttgctctgtgaaaataccaccaccacccatgcttgtttaagccaatgatagttgggcatcttattccttgtagctgagttcatcctgtctcatacatcattcaacaaatatttattgagtgtctactagtgctaggcaccattctaggtattagggtcataagaagagataaccgtctttaaggttttatagtctactcagggagacaggcaagttggtgttttaatgcaatagaaatgtaagaggtaggctgggtgtggtggctcacactctgttgccaggctagagtgcagtggcgtgatcctggctcactgcaacctctgactccccggttcaagtgattctcctgcctcagcctcccaagtagctaggattacaggcatacgccaccacgtccagctaatttttgtatttttagtagagccggggtttcaccatgttggccaggatggtctcgatctcctgacctcgtgatccacctgcctcggcctcccaaagtgctgggattacaggtgtgagccacagcgcccggcctgtaaaggctttcagaacacatacttcgttttgctcaccaatgcatctccagcaaggagagaaggcaaaggggccgtttctagtaaggtagggaaccaacagttctgcctcaaatttcctcatcttgggtctccccaccccctcacttcattcctgatactgccactattcattcactcatttaactaactattcattcattgcattagtcagctttggctagatctttttgtgtttttggagacaggctctttctctgtcatccaggctggagtacagtgatgccatcatagctcactgcaacctagaactcctgggctgctgggtttggtttctctgcttagcaatgtcataatagatgcttaataaatatgtgttgagtgtggtaactgttacttctgttcatcctgcacaaaggatgattgctcttctatgcccttctgaagttaggtgtagctatgtgacttgctttaaccagtaagatgtgagcaggaatgatgcatgtcaagttcaggtggaagcatttcagagctggcacagatctctttttctcttccccctgctgccagtgaaggttcagttgataccatggccaaatatgtaaacttgttattccaagctactggtagttcaagattgtttgttaccacaacataaccagggagtggctcacacctgtaaatcccagcatcttgggaggcagaggtgggaggactgcttgaggccaggagttcgaaaccaacctgggcaacatagtgagagacccgtctctacaaaaaaaaatttttttttaattagccaggtgaggtggtgcaagtctgtagtcctagctacatgggaggctgagacaggaggattgcttgggcccaggaattctaggttacagtgagctatgatggcaccactgtacttcagcctggatgacagagcaagaccctgtctccaaaaaaacaaaaagacctagccaaaactgactaatgcaatgaatgaacgattagttaaatcaatgaatgaatagcggcagtgtcaggaatgaagcaaaggggtggggagaccccaggtaaggaagtttgaggcagaactgtcagctccctatcctaatagaaactgccccttgccttctctccttcctccaggcagagactgcatcactgtagagayggaaaatgccaaacaagggctttcccagcctcccctgcagctcaggcatggacacatgacccagttccagctggcagatcctgaggactttctggagggctttctagaaagggtttttttctccccagtaaaactagtcttgtcatgtaatccactgcacattgagttttctgtaacttgcagcccagagcagcctaacagagacagcatggattgctgcagtaacgcagcaaggagatgaggcagccctgagcgcagaccttcacggaggggacagagaggcggggatggagtaaggaagccaggaagtggaatcagtaggacttggtgagcgactgggttcaggggttgggctgtgtgtgtacatggcaaaaggggtcaaaaaaaaaaaaaaaacccaggcactgatgtcagggagcccaagggaagacacaggtacttaatgaagacacccactccacaagacagtctatctgaggaccaaagtgtgctgtcggagttgtgaaaggagggctgaggactcaggggaagcctcgtggagaggacaggacatgaagcatggctgagcttcagatctgagtggatagaagagacggtaatgtctaggcaggcccttcctggtattatcttagaccaaatgttacagctagcacttcacaaaaaatctttgccttgcaattttcatttttaactttgtttcaaccattttcatctgttggacgaaaggcaatagagggccgggcgtggtggctcacgcctgtaattccagcacttttggcggccaaggctggcggattgcctgagctcaggggttcgaaaccagcctgggcaacacatgaaaccccatctctaccaaaatacaaaaaattagccgagcgtggtggcatgcacctgtagtcccagctactcgggaggctgaggcaggataattgcttgaacccgggaggcggaggttgcagtgagctgagattgggccactgcactccagcctagaagacagagcgagacgctgtcttcataaacaaataaataaaggcaatagaggggaagtctagttcaataccaaatatactatgaatgtcaacatcatttaaaatatggctactcaacatagcattgggtggatacactgtagatcattttactactcccttactctgcaatgtagctttacaatgcttgagtagttaaaataatgcggtgagctcttttgtttagaggtaggttatttccttagaatatatttccacaaatgggttaactaagtcaaatatcgaaaacagtgagtctcatctaagacacaactgttataattcttgataatttttttttaaagacagagtcttgctctgtcacagactagatgcagtgrtgtgatcatagcttactgtagcctcaaactgctgggctgaagtgatcctcctgccttagcctcccaagtggctgggactacaggaatgcatcactacacccaactaattttttaaaaaattttagtagagactgggtctcgatattttgcccaggctggtctcaaactcctggcctcaaatgatcctcctgcctcggcttcccaaagtgctgggattacagatgtgagtcactgctcctggccagagttctcgataaatagcaaattacctttcagaatggttctatcattgcacatgagaattttgttcaacatttaaagtgcaagactggctcacctgaaccaggaagaagttaacgtgtctttcggctgtattctccccgtgtgagcttagccctcagcactgtcctcatcttagattccttacagtcagggtatgctgctcccattccgaggtcatatggtctgactacagagctaaagttgtagctactgttaactgagctagaaagcaatatgttttctcacctttaaaaaaaacaaaattgcaaccctttattaaacagctaaacaaccattaaatagccaagtaaagaatgcatcatcaattgtttttacaaataaacctttaaataatgcttaaatttcttaaaaactaattgcttctgttcttttctgactaatcatgaattcttttcaatcacatcctaatcccatcctggtcttggttccctaattgattagattgggccatcctaggaagggtgggtggctcacaactgtaatcccaacattttgggagactgaggtgggaggattgcctgaacscaggagcttgagactagcctgggcaacatagtgagaccctatctcaacagaaaatttaaaatattagccaggcgtggtggggtgcacctgtagtcccagctatgctggaggctgaggcagaggatcacttgagcccatgagttcaaggttgcagtgaactatgatcacagtactgcattccagcataggcgacggaggaaaaccctgtctcaaacaaacaaaaaaaaaaacaaaaaacagaaaaagaaaagaatgggccatcttaactggagtggagtttaaaagtccttgcaggctgctgtagggatggacctggctttctcaaccaggaatttgttattgtggccattgggtctacttaactctgagccttggattcaggcccctctcaggggctgagacctctctgggccattggtagacagacagaagtggctgcttgtgtgacctggattatcatttctctccttctggggcacaggatagccctgggcattgagagaggagcaagatccaagtagagactgcaaaaggatgttcaaagggakggcaggggcttgcctccgagtttaattgggcatcaaatgcctgcatcattgaaaacaatgacctagtgcccggacaatgaattgcaacttctttcccaactatgcaactgatcataacttaacataatctgtcactttactttgctgaatcttatttcctcttctataaacagaggttttaaaaaaatctaatgcccgtaatcccagcactttgggaggctgaggcaggtggatcacttgaggtcaggagttcgagaccagcctgaccaacatggtgaaatcccttctctactaaaaaaaaatacaaaattggccaggtgcagtagctcacgcctgtaatcccagcactttgggaggccgaggtgagtggatcacctgaggttgggagttcgagaccagcctgaccaacatggaaaaaccccgtctctactaaaaatacaaaaattagctgggcatggtggcgcatgcctgtaatcccaactacttgggaggccgaggcaggagaattgcttgaacccgggaggcagaggttgcagtgagccgagatcatgccattgcactccagcctgggcaacaagagtgaaactctgtttcaaaaaacaaaacaaaacaaaacaaaaacgaaattggccaggtgtggtggcacatgcctctaatcccagctacttgggaggctgaggcaggagaatcacttgaacccaggaggcagaggttgcagtgagccaagattgtgccactgcactccagcctgagcaacaagagtgaaactccgtctaaaaaaaaaaaaaaatctaactgacagcattgctgtgaaagccaaatgagatgattctgtgaaggtctctgaaatagcaggctaagaaattatttgtagtagttttttctttaataacaatgccgctaacatctctattgcagtttatagtttacaggagtccttctcaaactctaacatgcatctgaaacactgaggggtcttgctgaaatgcagatcttagattcagtaggtctgggcttgggctgagatgttgctgttcacataccacactttgagtaccaagagtttccagtaatttgcaaacatgaaaatttctaacggtaggttcctagcagacttccagtcaccagttgtttgtgtgtctcacttgttatatggtcaaaatagcccgggcctttaatatcctacaggtgatataattgaatgatgcagatttttaaggcagaaactaggatctacacaagattttcctaagtgtgcttgatatgtcaatagatgttacttwaaaaagatgtggtcagtcaggcatggtggctcacgcctgtaatcctagcactttgagaggccaaagcaggagaatcccttgaacccaggagtttgaaaccagcctgggcaacataggaagaacctgtcttagaaaaaaaaaaaatgtagtcacatacatttactgaaacttgggttaaacaaattaagccaaaatctttacttcagagtgttatcacttatgatgctctaagaaattatcccccatatatatatatttatttatttattttcgagatggagttttgctctgtctccaggctagagtgcattggtgtgatctcggctcactgcaacctccacctmctgggttcaaacaattcttctacctcagcctcccaagtagctgggactacaggcacgtgccaccatgcctggctaatttttgtatttttagtggagacggggtttcaccatgttagccaggatggtctcgacctcttgacctcgtgatccacccgcctcaggctcttaaagtgctgggattacaggtgtgagccactgcgcctggcctactccccacatttctgaggtttgagaattttgtctgaaataaacagacagtagacagattaataggagaaaaagcataccaatttattaacatgcaaatgaatgggagtcccacaaagcttgaaactcaaagaagggcaagatgattaaagcttaaataccctcttcataggggagaggaagtggggggatataggcaactttagaagaagagtaaatgatttttaggggagattaacggttctgaagaacagacaatagcctgggacaaattttgcctgggatctgggtgtggtgtcaactctagtcttcctttttgcaatatgcatcagtttcctccagtaggtgaaatatgtggggaggggattcacaacaatttaatatcttccagagaagcttctgggtggagaacttcagagaaaacccttccctgcatttgctgctccccaggtactctcagtttgaagtccaaaacagcatattttagggtatcattttctgagccccaacaacgctttctttctcatgttagtaacataaaatccaaacagaaattgcttaaataaggatattttatttttctcccagtacaagacatttggcatcagggaaattctaattagtccagcggctcagagacatgattaaagacccacattccttctgtcttcttgctctgccatagatggcacagcacataggccttgtcctcaggatggctatccttatgaccagaagttgactgtggcaaaataaacatcacatcctgatgatggccaaaggcaaaaaaatgggttattgcttgtttgtctttttctttcagatgttgtatttttcagtgctagaattcccactgaggtctttttacagtttttgtttatctgctgaggtttcccttcttttcattcattatgagcatattctcatttacattcttgaaaatggttataatagctgctttaaaattcttgtctgttagtttttacatctgagttgtctcaaggttggtctccattgattcctttttctcttttgtatgggtcacattttcctgcttctaatgtcaagcatctttgaactgtctcctgaatattgcgagtgtacagtgtaggaactctggatttcttttgttcttctgaaaagtattactgtttgtgtttatttgttttagctagccgttaaattggccgaactctcaaactgaaaatgctcttccctctgatgaataggagctgaaatctttattttatttttatttttgtagagatgaggttttgctacattgcccaggctggtctagaactcctggtatcaagcaatcctcccgcctcagcctcccaaactgcctggattacaggtgtgagccactgcatctggctgggagctgaaatcttagtttagataatttagccttagccatgcagcttggagtctgtcctgcacatgtggggttcagagatttgagcagagtctatacacagaatttgaggctactcatttatggcttcttctcctttccaggatttccttcctcactttccagctgtgtagtcaccagagctctgtcctctggtttttcacgccagtacaagcgtgagctttacatcctagttttaaccaccccacacatccctgactaggggcttccctcagcaaacaaactacaaaaaatttyttaaaaaatccattgctattcccttcttccaagtattgtctcccctccaatatccatgccttttgatcactctccagagttttcatagttgttttttataattttgtcatgtgggaggtttgtggtcctatgggaggtactcagccactactgaatgcaaaatttttgttagtgtctttttaaagagcaaagacatctttctcagaattccccagcaggtttattctctatcttatggaccagaattgttttcatctgctctttcttaaactcctttgttctggggtcttcttgtcctgaagggcttggctgccctgaagaaggtaarcagaattaggatttgtttagtcaggaagaaagggaccagaatccaataaaacttgctacacagaacttttcagtgcctttaatatgaaggtttgcattgtcgctctccaartgcttatcccaatctcacctgcaatattccttaaatgtatttatttgatttagaagtcctttatccacagagatttgtcaggactggtctgaatttctggaagcagcagggtttcaaggccaccctttggtcacaatgctcagtgtgctgccccactatggcagtctggccagcaggttctgggttgtatcaccatttccaactcatcattgtgttgtgaaccacagcaatggttcagaccaaaacttgaggtctgaaccaattgctggaacagaccctcctagtgaccaagggagtattatctcagttttgcacaacctgttcctagaaggtggatttctcatgaaaaatccaaagacaaagggtctttccttggaaccacagctaaatttagggctcagggctttgtcagttatatttaagctaaactaagctgaggagttggtgactttcatggggttattgctttgcaggttatctggggaactcctccaaaaccatcgattatctgctgcaagcagttaaaactgtgtttaaagaaaaaaaatactgaaaaggtgaagtaaatatactagtaaagactattttgaaaaagaaagatccccgcaatcccaccacacaatggttttcactgtacagtccctstccacacacccacatttttatgtactrtatctccttgattataaaatactatcagtttyaagatccaacatcgatttagtaaaagcttttcaggagaaaaaaaaaacactgtgagaacctaataagaatgaacattaatactatacagccataaaaaagaatgaaatcatcctttgcagcaacatggatgttgccagaggccattatcctacacaaattaactcaggaacagaaaaccagataccgcatgttctcacttataagtgggagctaaacagtgggtactcaagcacataaagatgcaacagtagacactgggatctactagggagggagggaggagggcaagagttcaaaaactattgagtactatgcttagtacctgggtgacaggatcagttgtaccccaaacctcagcatcacaaaatgtacccaggtaacaaatctgcatatgtactacctaaatctaaaataaaagttgaaattttttttttaagaaatgaaagaccattgaggccaggctcatacctataatcccagcactttgggaggctgaggagggasgatcacttgaggccaggagtttgagaccagcctgggcaacacagtgagaccccatctctacaaaaaattaaaaataagcaggtgttgtgttgtgtgcctgtagtcctagctactaggaggctgaagcaggaggattgcttgagcccaagagtttaaggctgcagtgagctatgacacatcactgcactccagcctgggtgacagagtatgaccctgtccctaaaatataaaaataaggataaaaaataaaatggcaattgatggtgagatacatcttaatatcagaaaccttacaacttggggggaaaatatatgccttaggattgagaaatatatggaaaaagtatatttattttacttttactttgctatgtataagaaagtgttttaaattatttaaattttgaatcagaaacacattcacatggttcaacattcagaaggtgcaaaagtattgtcagggacaggtttccctactttccatctcttggtcccctccccagaggccaccgatgttttcagtctcttgtgtctcattcagaggtagtttatccttatatctgcaagtgaagtcttatgttctttgcccccttttttacacaaatggtagcatattatacaccctcttctgaacctcattttgtacttaaaatatcatacagatgaatccacatcaggtctgtttcgattatttttatttattttgtttttctaagattacatcacaagcatttatctatctttccatatgattkttttctggggcagggaggagggtgcgggctctgtcacccagcctggagtgcatgcagtggtgccatcacagcacactgcagccttgacctcccaggctcaagcaatcctcctgcctcagcctcccaagtagctgggaccacaggcatgcaccaccacacccggctaatattttgtgtgtgcgttttgtagagatgaggttttgccatgtcccccaggctggctttgaacggctgggctcaagcaatcctccctccttggcttcccaaagtgctgggatttcaggcatgagccaccaagcttggccacgaccattttcatgatcatttttaatgattgttcagttttgtgaggtgactagaccacaatttaataacaaatccctgttgttggacacttaggttgtttccagtgttttgctatgatagagagcacttgcaatgaccatcactaattcaacagatatttttctgaccaccatgaatggcaatcctcctgtgtaccgaagtgtcttcccctaaggggcttacagtcaaacagcaggaacagccagggaagtaaataaggcacagaagtgctcccatcccctaaagagcctctgaggacagtctgggctcccacatgaggaaaagggaggaggaaagtgttgatgggtttacctacgtattcaggtcaatgtaaattaacaagttaggttacaattcattcatcaggcttgtgagtttggtgaacgtgtgttcacctcagacgtggttccaatcttcgtgcactgaccatatcacagtcttagggcccagctgtgctgaacttacaaaagcgagaaataaagaataaaaacagttaacacttggtaagcacttgccatgtgccaggagaaaaccctaggaggcaagtttrattattttcccattttctagatgagaaagctaaggcacagagatgtcaaataatttgtcaaaggtgcaactaacatagctgtgtcttgaactaagacagctggactccctaagtggccatactgtaccgccctaagaaaggcggctggacttaaccctggcggcacatcttgtctttgctccatggatgctgatctgatccctttctcttcttttaaccagggtaaactcagggtgcctttatttcttttttattggatgaacattttcctaggatgagcacggctttttatcctctggggagaatcgcctgccagagcctttgagattgggattctccttctccactggggagggggtgcagaggttcttccaaccctgcagccaggcagtgcaaggagactgagagcctgggggtgacccagacctcacacagttggtcctagggctacagaagcccaggctgatcctctggctcagacctgtcccaccttcaatccactttcccctgtcccccacctcgtcccaccctacctctgtcccacagacaaccctcccatcctccactgctcccactctgccctkaatccccagacaacagcaagcctaaatctcatcagccagacggggctacgcagcacrtgtaatgaaacctcctgccccatttytaataattcaatttcttcatagctattggaacaaaaggccctcttcacctcagaatattccaaatgccaaaacaaatagcagcgcacagaaaatgtgaccatccacagtaattcttctttgtttactgtaatggaagtaacaatgaaaacaacacaagaggctagcagtgaaaaatgggtttccctccacccgcaagccccagtcccttcctcagaagtaaccatcctcagcggttttatttctgaaatgttacatgcatatacatacagaagctcttcctctaccttttagacataaatggtagcatactatattscctgaatccttgtttctttatcgttatttttccttcttaccaatatatcttggagaacgttccctatgagcacacccaggtccacaattattcttttcartagctgcagagaattgcattatgtggctataccatcattcatttaactagcttgccattgatatacttttaggttatttctggatmtttgctattacaattgatgctgtatttaaaaattctttgcatatatttttggaggactcctatgagtatttctgtaggataaattcctgcaagtattgatttttaaatagatggtgccaaattgcccaccaaaatgcagcttttcaaaggagactgaatgaatagcttaggcttgatggtcaaatcgtttaaaataaccaagattttattttatatgggagagcatcctgatgcctttaaaacataaaccataaacacaaaaaaatataaactataaaagaaaagaatgacacaatttattacattaaaatttaaatcttttgtatcaccgaagacaccattaaaatgttgactaaaaaactgcacaccgggagaggatatttccaatgcattcagcggagccaatattartaccaacgtctacatgttattaacaaaaagacaacactccccctgccctgcattcccaaatggaaaaggctaagaacaaggtattcagagaaaaggaaacaggaacaaccaatgaatgaaatgaaatgatgcctagcttcaccaaaaaataaggaaaatataaattaaacaacagtgagatagcatttcatagccctcagactggcaaaacgttttaaatctggtaataagagaagtgacgtgattaggactcttataaacactcaatgggagtggaaactggcacacccactctagagagcaatcgagcarctccttgcagagttgcagaaatgcccattgtattaaccatgctttcttattttgtgaatttttgatgttctggcatttgtggcctcactgatgggggcaaggctgcccctcccagggctaccccattcttagagatagcagagggctggggtgggtggggcagcggcgcctctcatatgtaaactagcccatgctctgatccaccctctctatctggcttttacactccaagaggcaaaatcacccagagccaggcaccagtcaactagagaccaaccctatgacccagagcccgccaccttgatttgaatcagccagtcctaagctgcttccctgcccctaagctgcttccccgcttcccttccctttcccacggaaaacaccgtaaaggctctgggctgtgctctcctttcgtcccttctgccccatgaccgaacctggagcttccccatgcagtcctgcatggcaaggaaatgtaagtatgtgcaacagaaatctcttcaatgacactagcctctccatgtggtaactcagtcacctccatcaactgaaatcctgtgggtaccattgataaacccacattgtgacctgagaaattcctatgcagggccaaggaaggatgtacacaaaaggattcactgtggcattgctggttacagcaaaacactagaaacaacccaaatgtccatcaggaagagaatgatacatgttgtcccatggtctcataatgggtcaccagaaagcaggaaaatggaaaagactggagccagggatcataacaccaagtaaaaacagcaatttgcaaaataaaggcaatgtgtttgtttatgtgaaatttttaaaaagatttataaaacgatagtatatattgtttatgaaacatattaatatactgaaagtataaaaaacatggaagggaaagagtcccttcaacctggaacactccctccctggttctcctgggaggggaagtgaaaggtgatattgattaggaaacagtttgaggaggtttcacctttamttgtgacgtctcattgctttaaaaccagggaaatagctgagccaaatgtagtaaaatgttaagatttcttcagtctggctggtgrgtatatgaatgtttgctgcactagtttgggtactttatgctagagctctttcattataagaaaaaagatactatttagactgcatgaataatctcaaggtcctacaaaataacaacagctcaggaagccagcaagcttctcaactgtgcccatctcagctgtgccaaactttctcctctctccttacattgtacctttaaaaattcctgactttttggaaacatttaaacacttctacccccaccatggatatgtctacatgtttggtcaagtattcaaaaattaagtcacacacctcaaaaggccagtgctacagtggagggctgtttaattagttatcaggaccaggcatggtggctcatgtctgtaatccgagcattttgggaagctgaggggggcgggtcacctgaggtcaggagtttgtgactagcctagtcaacatggtgaaaccccatctctactgaaaatacaaaaattagctgggcgttttggcacatacctgtaatcccagctacttgggaggctgaggcaggagaatgtcttgaacctgggacgcggtggttgcaatgagccgagatagtgccattgcactccatcctgggcaacaaaagcgaaactctgtctcaaagagaaaaaagttatcagacccccactgtatttttcaggaggggtagggaagagaaaaaaaatctacttcttggcttctaacaaaaataagttggtaaacaatttctaaaaatatatacaaattttcaaattaagttttcagaattttcatgaatcagttattttacctacgataacaaagtatctataccttaaagtatttcttttgtttttactaaaagcaaagggcatatttcattcattcttctcaaaataagggctacattttactagaaatatttaagagctcttgcactggccatgaggttttcagcagcaaatatcaagggaacagtgactaaaarcaaagacattgagttatctgtcatcataggaagcacacacacaaatggtgtgggggttggtgcagtcacacaagaatctcatcaaggacccagggtttytcttgctttctcttatacgatttttgatgccttagccagccttcaaatttgcccttgataatacccaccctctggtattcacacttttcctacattttaccagggctggtctgtgtgaccaatagaatatagctgagattacatcagaggttaggttataaaaaggctgcagctcccatcttgggctcacacactctccttccctcattctctctctcactctcttcatctctcactgaagaaagtcagctgccaagaaagttggctcccaatagagaggcccacttgatgaggcactaaagcttttgtcaacattgaccaagaactgatacccactggcaaccagaagggtgagtttggaagtgggttctttagctccaacgagccttgagatgactgcacccctggctatcagcctgaatgcaaccttgagagacaagagcgagaaccacctgctaagccacttgcagtttccagaccctcaaaaatggtgtgaggtaatacatgcttattgtttgaaagtgccatgtttcagggtaaatcgtcatgaagcaatgggtaaccaatacactcagtgtgtctgccacgtttcccctgatggatgtaaaacagytgtcatagatccgcacaccatatgctcccaggacagtgtctctgtcaggaagaaaatgggatggggctacaggggtctccctrtgtgccttttaccttttatcaaggagggaaatctttccaagaagcaatccagcagagtccctgttacttctcattgtccaggggggtggggtytgatgatcaccgtgagctcatgattcacccttagctgaaaccaaggaccaggcctttcagctgctttacagggaggtgggcaaggagtaagtgggccgcagatggctgctggtagccagcaacagtctctgccagcctcccacaggctccatttgtctgattgtttgcacctggcatccttcatgctccatatttactgtaagctggaagttaggcctcaattagattcaggtgacatcgttttggcaagaataatcacgggtgatgttgtgaccttcctactctaccgaatcaagaaaccaccaggttcttcactaaattaacattttcaggaggtaagcaaagggtgataccccatcaggtaaaagccagtctggagtctatgtgcatctttctccccagtatccatcctgggtggcttcacatatcttaaacttatgggaagtccagtttcctctagaaattcattttgggttgtcttgttggaagtgtgtgataagcaatctgtttctcccacgtgatttcctcagggatggatgagtcagacaagcagtgttaacttagttaaaaaacacctgcaaagatcatgagatgactaaaaatcaaatacagagatgctggaaagtgattcttcctcgatgtcattcgcttgaagttcttagggcgtgagtagaggrtcaggaaccagggcgaatgaaaggaaccttctcaagagtttagcacccagcagaggacaggctgaggcctgctgctcaccagcccttgtcagctgtggagaccagtctgccaggctcagcctttggggtccaggttagcagctcctccacggccttgctgggtatagtcacggatttctggctggcgtgtttgcatggaggaggctktgcgtcattgctgtctccacgtccacagggaacagaaacatatgtgcattcgtggaagtcagccgggtccaagyaggtggggacaacgggggccatgtcaggatgcactgtctctgaaggggtggtgggtccccagccccccaggtgcctgmagcccatgtacagcaggtggccttgctttctatttcactgggatgacccggaaaaagaaacttatccatagctgtcctcccctcaacatgaccccacaccctcctccgcctgcttacccttctctgctgcctcagtggcagggatctctgtccttggttctggtgccatccctgccccccccatggatagtgcccatgtcttgctgtcatctcagatgcatcttaaagtaaaatcatcctccacccagcttccccaggtctgttccagtttccccaactctgcaggaggcagccccactcctccctacccccaggctaaaagtgaggcctcagccttgactcaccctgcccatccaaccagtccctggccctgagagtcttctgcagcaataacttcattaacttgtcttcctgcagctgccaccctggcctggccaccatcatcctaggagaatgggccaccatcctccttcctcattctccagccccagtctcatcttccttccaaggctctgcatcttgagacctctccaagctcctcctcatgtcgcatgtggatcaagccttcccctttggaccctgcctttctattccaccttatctctggggtctatctgttccagaagccttgactcttactaccctctgataaccacagacgtgccgtgtgccaggcgtcctacagccattacctttagcctttacagctactgtgcagcataggaatgacagtattgtccctttcacagatgaggaaaactgaggcccagagagatcatgcacaggtcacactgcctgtaaatagcagagttgggatccaatgtcatgactcagaagggttctcatccaaagcccttcatcctgtgaaacaggtcccattacaccccttcccttctctgcaaggggctcttgctgctcctcgaccagtgcctgcctgctcctcccagctgcctccagtcccgcagcccacacctccgccgcacagctcctcagatgttccagcccacactgctcagccccgcctcctaacttttctggcaggaatctcagccctgcacagtttagtacttaattatagattgccttgtacagttttctgcttatttcacatttgcctgtcttgttcccaagaagcctgcaaatatctgatttggggatggagcttctgtgtgctcctgtcccccagggccccgacacagcacagggcttggcacacaagccctcagtggagctgacctcacctcccaggaagggggcagggtctctgctgtccaaaagctgactggactccaccctgacacacccgcccccaccccagcagtatgcctcagatatctgcacacacatgcacacatgcatacacacgcatgtacgcacacacactttatctaatctaaagctctcttttcaacctgaggcaatgatatgcctggaattacctacccaagacagaaaactccctcctaactgaagcctggccttgccctcactgtggaattcccatgcagataagtgagtccaccagaatggtgcaagctccccagaagcggggaagccactgatgtcacatcctggattggcacttggtggaggccttggtgtcttgattctgattctggtcctgttgctgtgtggtctttgaggggagcgggagacgccatcttgccttctttgttatatctccatgaggggacattttgtgggtgtgagaaccactcctccccatcaggaccacatgatacagcccctcagggggcagaaccgcagcccctggagctaaccctggtcctctcacaccacctcccttaccaaaacgtctctctgccctgaccccgacgtccccacaggtgacctccccagctgctcctccttggggttaaacattgctatctcaaacttctcatttctgagcgggaagaagaacacgcaacacgaagcctcacacacttagaatgatctagatttcaggttgatttcttcctgcacacttagaagatagcatgagggcttggggcttgtcgagagggcactgaccaaggtcacagggtcagtgaagggcccaggagaagaaacagagagaggtgcagaggcggtggtgggtggggccgccaaagtcacacttctcttaaaattttacccagggccaatgctaacatgtaaataaacaagtgaataaacaaaggggtgtttatgtaagaaaaacaaataaaaatgcttgtgtaacacatcacacataccacatagcctgaaggagcccaggaggggcatctcttttgggggacccgtccaaaagagatggggtaggcaccgtcctcctggagggaggcgggcttggaagcccttcacggccgcagcagcatgttggggagggaggtgtacaccgataaccatcacggagrttttgcaactgaatgttgcagctgagggctgggcagagcccgcctccttgggcatggccctgtgctggggagcagtgaatgcgccctggtataccatggatgggcagagggctgaggatcccgtgcccgagatgaatctagccaagaaatgaagccagtggggggctcacaggaccaagaccctgctcacacaccgggggagccttctgcatctcattctggggcccctttccaacctttggagttgcctcctggcggagcttaacargctgaggcagcttcctgagcagcctgtggttgctccagccgggtagagacagccacattccaagctccggggtggcagggaagctgggtagggagttcctacagggagcrgcagcccaggctcgggcaggcaagtgctgaagggtggctccgccttccgcagaaagtcagaggccgaggagatggaagaacaggtgttcaagggggacccggacacccctcactccatctccttctcgggcagtggattcctctccttctaccaggcgggggctgtggacgccctgcgggacctggccccccggatgctggaaacagcccaccgctttgcggggacatcggcaggtgctgtgatcgccgccctggccatctgcgggattgaaatgggtgaggcctgtgttctgggtcccctgggaagtctcttgggggattccacagagacagaaggagcgtgagggaggctggggatgctttgggggacaaagccaggcctgggtggcaggaagggaagggaagagctggttggagtaggatagcggcagctgtgacgtttgaaggttggggtctgccaggccccagactctaacatgcagggtgagcctggacccctgtccctctccctcagtgcccttacctgtgagatgctctgtctcccagtgcctgggagagtaaaggacagtatctccctcgaacatcgaacatggtgctgtcagaagctacaccacggcacagtcatacattggggttcagtgttgctcctgcctggcctctttcaaaatgcaaatacccttgggagaggcaactcttcaaatctctatcaccctgatggggacgtattgtccaccatttccaggtggctggaaagatgaacrccctgaggctggaggggtagacaggagggagcccagagtgggagaagaataggaaggggtggggagagaatacagaagctctcacttcaccttctgtcctgctggtccaggagcctcagcgagaagractgctacactgctaacccagagagagaaacactgtcccggacagcagatgcatctagcagccccaaggaacaagcccaacagcctagtgagctaccttggaggggcatttattcatttacagagctcctattctagacagagctctgttccaggcactgaggacaaggtccccgcccttgtggagcagaaattctagagaaaagaaacagataataaacattcaaacaaggcaccttctagtgtgaggtcgggaagtgatatgatctatgaataaaattaaagcaggaaagggactgagaatgaaatggagactatttcaggaaggtggtcagggaagcctttctgaggaggtgacattcaagcctagagctgggtatagtgatagracaagctactgggagctcytgaaaaggagaattcctggtggaggagcagccacgaagcctgcggtgtggaaaaggtggtgggaggtcaacaggggccaggtcatgtggccttagccacaagctctcatctcacctaagggagggggagcacagacggctgtgacagcaagtggggagggggcagagggcgtgagctcctcaggtgggatcccagctctgccatttcatgatgcatgcctgaagtaagttattgaacgttctgcgcctctgtttctccgtccacaaatgggagctcctaatagcgcctagttcccggcattgttacagcagcggtctccagttgacaccagcgactggttttgtggaagacaatttttccacacaccagggttggtgggggatggtttcagaatgattcaagcgcattacatttgttgtgcactttacttctattatcattatgttttaatatataatgaaataattatacaactcaccataaggtagaatcagagccctgagcttgttttcctgcaagtaggcagtcccatctgagggtgatgggagacagtgacagatcattaggcattagattctcataaggagtgcacaacctagatccctcccatgcacagttcacaataaggttcacgctcctataagaatctartgctgccactgatctgacaggacgcggagctcaggcggtaatgtgagtgatggggagccgctgtaaatacagaagaagcttcacctgctgcttacctcctgctgtgcggcctggttcctaacaggccacagacccggggccatggcctgggggttgggaacccctggttataggattggctgagctaatatgaatacctgcttagaacaatacctgacatatggcaagtgttgagaatgtggcaaccatctgattaggcttcttaagatctctgaacgatgggcagagtgtgtttgagggagcaaggtggaaactagataagggaagagattggattcaggacgtgctttgaaagtagagccagtgagactttctgaagggccggctgggctgtgtgagggagaggctgcagataatagccccctcccagcccaagcagggtgccttcctggctggggacctctatgctgggtggaaagtctttattttaaagaataatagtaatgcccattcactgagtacctctaatgtataatataattttttctttttaatgtctcacaagtaataaacacatttttctcactggacaaaattcaaacagtgcgaaagtgtatagagtaaaagtagaaaatagaggccagttgcagtggctcatgcctgtaatcccagcactttggaaggctgagacaggtggatcaggggttcaagaccagcctggccaaatggygaaaccccttctctactaaaaaaatacaaaaattagccaggcgtggtggtgcacacctgtagtcccagctactcgggaggctgaggtgggagattgcttgaactccagaggcagaggttgcagtgagatcgcgctactacactccagcctgggtracaaagccagactctgtctcaaataaataaataataaataaataaataataaataaataaataaataaataaataaataaagagtagaaagaaagcctccatttgcccggctgcccctaatcccccactccctcctctagccagtgttaagggctaggcatggatctttccagatctttttaatgcacagtcttccttgaatgcagccattaatggctcttccccactgaactccaggccttcagaatggggrtagggtgacagcccccactctgtcctggagtcaccgaattcctgccttggaaacacctggtgcagggattctctctccttttccgggcgcctgcgttgctcatctgctccattaccctcactcttctgtctttatgtcatcttaaaatacagcatctgggtgcagtggctcatgcctgtgatcccagcactttgagaggccaaggcaggaagattgtgtgtgggtccaggagttcaagacaagcctggatagtacaggaagaccccatcgcaaaaaaaaaaaaaaaaaaaaaaaagatgaagaaagaaagaaaagatttttcagacctaatttaactcattcagtttgatgaatactgctgcaaacctacttggccrggctgtgacggtcatggacggcagtggtaggaactaaaacctgtaaaaaggacatcaagcagtggggtgtaatcaaggactagactgtgggctgctcgtaattatcgcagaagtccagggaagggtgagggaggtatgtgtgggactcacgctgtcckctcagcagcatgtttatgagacttgtcaatgtcactccagtctagttcattcactcattttaactgccatacaatttactcttaactagcacttccttttatatcaggcaccgttctacctctggcatattaacttgttcagtcctcacaacagccctcccaggtgaaaactgttattatccccattttacagaggaggaaaatgagtcacagaaaatttaaataacttgcctatagtcacacagatagcacttggtaaagctagaattcgaactcagtctggccaaagtctacattcttatcctttaaattgccctgcttaacaatgcgatgttaaggggtgaggaggcagggtcggggagtctctctgaacaggtggaatttccacacagacctgacgtgggtaagggaatgagcccaagaatatcttgggaagaacattctacgcagaagcaaaagtctcatcgttagttagaagccgaaaaggaaccagggctagatctttttagttagtcattttwttgatggatctgaccagtttccttgtygttacaaccatccttgtttgtgtctcccatgctcacatgacatgtatatcattctagggtatttgtgtcattaactttgttaatgactttgataagttactctccaaagcagttgtaccaatttaatcacaagcagcagatatgagttctaatttccccacaatgtcacacttgaaaatcttatgccaaccgaataaatgtgaaattgtgtctcatctactgtatttaatctacctatcctgackgctagtgatgttcagcatccccatgtacttattgaccactagacgtttcctcttctgtactgtgcctgctcaccacctttccctgttttttcctactgagttatctttttcctttaatgtgtaggtgttctttatatattctgtacacttatctttcaccagttatgcacaatgcacctctcttttcccactctatttcttgtatttttattttgcttcgatgtcttttgttattcagattttaattttaatgctgtcaaatgtatccatcttttcatcttacaacttgggttttrttttgttttgtttttgagactaggtctcatcctgtcacccacatyggagtgcagtggcacattcatggctcactgcagcctcgaactcctaggctcaagtgatcctcctgcatcagcctcctgagtagctgggaccacaggtgcatgccaccacgcccggctaattttaaaaatttttttgtagagtcagggtctcactatgttccccaggctggtcttgaactcctgggttcaagcaatcctccttcctcagcctcccaaaatgcaagagttacaggcctaaaccagtgcrcctggccatcctcttataatttgtgttttaaaatatctttattacaatgatttcttctacattgtctttcaaaagttttaaaattttcatatttagrwtaattcctcaggaatttattttgttgatggttgaggtagagatctaatttttaaattgttttgccatgtgatagccaattagaggctatctccacacttacttgaaatgctgcttctggaatattcaagtgtctcttctattctgttggctaatttgtctatttctgttttaatcattatagtcttataataaagggttcatcacatatgacaagcaatctcctcctcttcttcctccttttttcktcttcaaatattgcctccattatgtttggccctttctttgccccatgtgaaaagctctgctgggctttcgactgaaattgcatctttccatttgtaaatatagttgatctttctattctggtctttttgtgtccttcagtaaagaytttgtgtgttttattagatttacttttcccttgtagttttattttttattgctacgggaaatgggaccttttttacctatggcattttctttctttctttctttctttcttttgagacagagtctcgctctgttgcccaggctgacatgcagtggtgtgatctcggcttactgcaacctccgcctccygggttcaagagattctcctgcctcagcctcccgagtagctgggcttacaggcacccaccaccacgcccagctaatttttgtatttttagtagagacagggtttcaccacgttggtcaggctggtctcgaactcctcaccttaagcaatccacccacctcggcctcccaaagtgctgggattacaggcgtgagccaccgcacccagctagcattttctgaggctcttctcaaggccacttccccacttttgtagccagtttggggcttttctatcctgagatcctgtgtttttttcctgtgaaagctgaggtggcagaggtgcaacttctggcgtgtatgcccagttctgtgactaggccagttcaaggcacatgaaaatgttgtaaaagcacttaacatagtgcctggtttttactagagatgtrgtaaccttcattaatccattcattcacctaggaggggtggtctccgtgattgccactgggggatccagaatttccaatcttgtcagaagtggggttggaaacgtgcctcaaagctgcatttgcataattttgaaaaacaaaatgtttcttatggaagaatagtgatttggcagacttaaaaccctactcccacttaagctacttcttggcacctttctccccataaaaaactggcaagccaatctgtccgtcccttcgttcctttcttcgttcgttcgttccttccttccttccttccttccttccttctccttscttccttccgtgttagttgagcacatactaggccctgcagaggatgcgaagatacaacacaaaatgaaactctgatcttgctgcaaggagcttacagtccactcaaacttaaaggcacctaccaaacagttataatacaagaaagttcctattgaatgttagagaattataaggcataggagtgcagagggatggagaaaacacttccaaacatggaaggcctcatagaagcggcatttgagcttgtccatgcttgaaatgtgagaagttggacaggtagagacaggttgggcaggaaccaaggcttccagcaaggacatagcatgacaacacgacaaagccacacagtggggaaacatgatgcctccagagcatggtaaacagtgcaagtcarctgacgtcaggagttgaaaggckttgcctttcctgtggtccaagagccccctgccatatctgcactccagctagtcggaaagggaaaagggaagggcacagtcctttagagcaggacttggaggtaacacatgtcctgtcagctacatcccatggattggaatttagtcacatggtcacacctgactgcaagagaacccaggaaatgtagactttatttttgggaggccatgtggccagctaaaaattggaggttcgattacaaaggaagaaggggagaatgggtattggggacaaccagyagtctctgttgcaacaaccataatcaatggcatgaggatcctggagaaactctgcccctgcctgagaccaaaaccatgacttcctaatcacaaagttggccagatgcagtggctcgtgcctgtgagcccagaattatgggacgctgaggcgggagaattgcttaaggccaagagtttgaggccagactgggcaacaaagtgagaccctgtttctacaaaaaataaaataattagccaggtgtggtgacctgtccctatagtcccagctactcaggaggctggggtgggaggatcacttgagcccaggagtttgaggctgcagtgaactatgattctgccattgcactccagcctgggtgacagacagagaccatgtctctaaaaacaaacaaacaatcacaaagccaagtccagtttgttgtctgggaaagggctcagctctggcccaccagcagctgcccctgtggcagtgggagcatgagtgcctcagtcttgcagcagggggcctgggcaatgcaccatggcacctactgtgtctcctgcctagaatgaccctctgcccccctttcagagagaaaacctcctctccagacaccatcccattttaccccactccatctctcttttccatgatgtctagtttgcccataaaatctgcccacatattctagcatttgatgttgtacggtcttaactgtttcagatacagtgtctcatttcatcaactagattggttgagcaatctgagatcttgtgggtcctatggctcccacaaactgctcataaaacaagaactccttgataaactcctggtgtttgctggctattggccagtgtgatactgaatgtgtctttgctatctgtattttatagtttccctggctcttggataattttctgtagttatggatatgagatataacgctagaatgttacagtgtcaaggtcagtaagtccagctccctcattttgcagataattgtatttagaccctgggagagaaagtgactagttggaggcagacctcacttaagccaatagtttccraactgtgttccagggatccttagggttctgcagatggggaggaaaagcaggggacagacacgtctgaagccccggctgcactagtacagccccgctgttgtccatcttatacatgggggatcttgctaaaattatatgtaaagaaaatctttcagtaatttcttttaaagtttgagaatcactgtttgagcccagttccctcaagatgcagacaaggagtttgaggatcagattttggctgaattacggtgatgaaatagawcattcattcgctcattcattctaggtcctggggatctggcagtgagcaaagcagtggatgtccacactcatgaagctgatattctcttggtgaaattaaaccatagaaaattaagcatataaaaaaggtcagcatgmgtgctcaaaggagaagataaagcaggggaaggatgggagaatgacacaaggggcacagtgttgggtgggctggccagaaggcccctctgaggtggatgaagctagggagagagccacgtgcactgagggaagagagttccaggctgacaggtctgcaggtgtagttgccccccggtgaaaacatgcttgtgttctcagaaagggagatggcttgtccctctggacgggaaacaggcttcaaagggatcttgcaaaacacatgagaggtccagaggagccatgtgttttgccccctgccccgcaaatgtgtgcacaacaggacccagcacaacttctcccatggagacagagcactggagaagtgttttggttggcctcccacactagggccagtgytacctttggcagctcctgcccacccagtaactgaaattctcctggggccctggagctgaggctggctggttattgtcattgataggtggctcaaggtgtattctggtccactggggctggcactggggagtcaagccttcctctttgagaacctcgctttagtaactcctttcctttgtcactcatgcacctatctttgttactcagttgaggaatgagacatagccaggattagtggagaatagagttcccaggaaggaggagggctagggctgaacttccaactctgcccccaagttctgtaggttcttggctggccagggwcccatctcgcccttggttttgccatctgtaacttgggtgattggaaacacatcccttggacattatggtgaaagacaaaagaagtcatggatgcattcctggcccagtgcttggcaaatattagtcacaaaataagtctttgaagaatgaatgttgaatgaatggatgaatacgtgaaaagaaaattaccttgaaatagaaaagcatagataaagcagcactttccaaagtcaagaatgtcccagagaacaaattaaactttattaaaacaaacaggctgggcgtggtggctcacgcctgtaatcccagcactttgggaggccgaggcaggcagatcacgaggttaggagatcaagaccatcctggccaacacggtgaaaccctgtctctactaaaaatacaaaaattagctgggcgtggtggtgcgtgcctgtagtcgtagctactcgggaggctgargcaggagaattgtgtgaacccgggaggcggcggttgcagtaaaccaatattgcaccactgcactccagcctggcaacacagcaagactccgtctcaaaaaacaaaaacaaaaacatagatgactggaatccagcctggcctgagcaatgtttttcatggtaattgtgagctcatctgcacaaggacttggtttttttgcaggaattctgtgtggccccggcagtggaaggacccatctcagctagtttgcattggctccggccaaacaccctaggattattgctgacttgggaccaattttcatgttaattactctgtaggttgtatcaattcaagctctaaaccatatgcaatacagatttgggtctttcattttttatgggaggctgtgttttttcacccagatccctgggcagacacaagccactggcaccttgtaatagcccagcagcctttggagggtcctagctttaagcagaggtctcatttcacccagcccaagaacgtagtccctgtccctgccagtttcttgtctgataacagtccccacagttaccacatcatcagctttccttctcatgccactggctttcagttccctcttcatttcttcctttcttgtgagttcaaccatgtcttgtaactgttttatattgtatttaatattgggcttttcgttgttattgttgttgttgtttgaggcagggtctttctctgtcacctaggctggagtgcagaggcgccatcatagctcactgtaaccttgaattcctgggctcaagtgatcctcctgcttcagcctcctgagtagttgggactataagcacgtgccaccatgtctggctaatttttaaaattttttttgtaaagacrgggtctcactatgttacccacattagtctcgaactcctggcctcaatcaatccgcctgcctccggctcccacattgctgggattgcaggcatgagccatggcacctgatctcttgtttctgaagctggaaaggttcctctttagctcagcccaccatactactggagctggaagtctctccagtgttccttaatacakgaatgagaacctccattttttcctgttgcaggtgtgtgggtgagtgtgagtgggtgtgtacgtgtatatgttgcccagatgtaacttggatttcagtcctggctgctgggtacactttcagaatcaaaatgtcttcattaaaaatcactcccaaaattagttatctgagatggaagtgttttctgtaaaaaggtattctgctcaaattcccatcctagtgtcttttgaataacagctatttaccaagcacttagaatgtgccaggtcccgtgctaagtgcttcatatgcatcatttactctaatcccctcacaaccctatgaagcagacactatatttatactcactttacaaatgaggaaacagggatttagagagattagataattttcccaggtttatacaacagagccaagactgggatttctctaaatgtctacattctacatcctctctaatcatgatttcagaaattgctttgcaagcaacatgacagctttcttgttacactccatgtgtcaagcaattatttatacattggttaagaaagtgagatctggccgggtgcagtggctcacacctgtagtcccagcactttgggaggccaaggcaagtggatcacctgaggtcaggagtttgagactagcctggccaacatggtgaaaccttgtctctactaaaaatacaaaaaattagccgggcatggtggtaggcatctgtaatcccagctactcggggggctgaagcaggagaatcacttgaacccaggagrtggggaggttgcagtgagccgagatcgcaccattgccctccagcctgggcaataaaagtgaaactctgtgaaagaragaaagaaagaaagaaggraagaaagaaagaaagaaagaaagaaagaaagaaagaaagaargaargaaggaaggaaggaaggaargaaggaakgaaggaaggaaggaaggaaggaaagagagasagagagagagagaaagaaagaaagagacagagagaaagaaagaargaaggaaggaaggaaggaagggaaggaaggaaggaaggaaggaaggaaggaaagaaagaaagaagkaaagaaagaaagaaagaaagaaagatcaaatggcatgacaaatacaaaaggactttttatacaatattatggaaatggtgtcattgtgcgatagttgttgtagctcccactaccatgttggaaccagtatcttccatctcactcaaatgaacttatgcyttacatgtttaaacgtctctatccaaatggataaagattcattttccccaaacaatcccttggactttttagtagaagagcattgaatggaagatctggtaaagctttgaatgtgttggttacacagtagaaacatctatttggaaagcaactcatgtaggtgacatatgttaatccatccacctggtatcagcaggtgctaactgagcccctgtgagtgccaggcactgtatccctaacaaccttgcttgawctgtgtgtatgtgtgtgtttttaatttaatttaacttttttgagacagagtcttgctctgtcacccaggctggagtgcagtgacaagatctcagctcactgcaacctccacctcctgggttaaagcaattctcctgcctcagcctcccaagtagctggattacaggtgcatcccaccacgtccagctaatttttgtatttttagtagagatggggtttcaccatcttggccaggctggtcttgaacccctgacctcgtgatctgcccaccttggcctcccaaagtgctgggattacaggcatgagccaccgcacctgacctgatctgtgtttttttaaaaatttaataataaactttttattttggaataatgtcagcttcacagaaactttgctaaaatagtacagagctctgcgtatccttcacccagtctcccctaatgttaacatcttacataaccatggtccatttgccaacactaagacatcaatattggtacattcctattaactatactgcagacttattagaatctcaccaatttttctactaatgtctcttttctgtcccagaatccaatccaggattccacactgcatttggaggatccatttttaaaccaactcacttagacagtattaaaatagcattgttttctttgcttcactttgggctcaaattcaagaaagacagttgagctctttttccaattctagggggaagacagccaaacaaatggtaaataaacctccagactttttttggttcccctgagttaggagttcacccatgaatcctgtgggtaacccaactctgtccttacgaaatcaccacgtaaggaagaatctcctcagctgggcatggtggtgcacctgtagccccagctactcaggaggctgaggcaggagaatcacttaagcccgggagttcaagtccagcctgggcaatgtagtgagaccctatctctaaaaaaattaagaaagaaaaaacaaaaaaagaaagaatctcctcctatgccctagctcagagtctagtatgcatccatgtgggaacacaagttagaagcaggattgacagagcacactgcctgtggtttgcctcatcagacctcaagtccagctgagtcttaagactagggggtgacttagttcacagctgttgcatcatcccagtgtccccttggtagtgcatggagaatctgtacggcaggataggccacagcctagatgagaggcagaattaatttccaccttggagcagggccccaaaaggacttctgggtccaccaaagaaaacagagagaaaagagcaggggcaatggccctgaatacatgatcatttccagggaactttctagatgcattccctctctgcctgtttcacctcagggtgatcagtaagaacctgcagtgggatgttggaggttgtgcctggattctggggggaaaagctcatagtagggtgagggctgaggccccaggccctctacctgagggcaagcaaagagtcctgtggacaccttgctaggagcacaggtgatgaatcagcagaagacacttctgtttccatgacaatcggatataagccagtctgaacttttaaatccaattatttagtaaactcttagggttagaagaaggtctatgtggaggattgttattatccattaaagaygttgttttgtttggtttggtttgaagtgctgaataggtcagagttgttttgctgttggtgaaaccctgtaatgcatttagggcagagcagmaaaatgtgagttttcacatacattctagttctatttctgcaaacaaaaactgtgtgacctaggtcctagggtatgtccttcctttatccatccatccatccawccawccatccawccatccatccactcatccatccatccatccatccatccatccatccatccatccatccatccggctgacatttactgaggctcatctttttcctgggcaagatttcttacctgtaaaatgtgagaattcattgggacttgtatttctgacctaggatcccagaatcttaggagtctcagggcagtgttttgggggctaccttcctaaggtgggtggggcgatgggacagtctcagaacagcctcaacccagaacagccacatttttagctgttytatatattgggtttctacttaagatttctttcgaacaaagcctcccttactgaaaactcactgccccagagggtctctgtaaaccttctagtagtgacactgtagcttcaagccaaattgtttttcaatcaatacccctgcagtgtagggcatagaaataaaatggtaaataaaccagggtcactgctcctcggaggctggctgtcactgtgaggataaactgagataataggtgggaaagcctgyttagggaaacgattgttgttaagatgataacaattattattacgytggggtagggtattcaagatatacccacaggaaaatgcagattacaattcagtctgcamttagggaccagatagcagccaactctcaggtgatccatgcagggattctgagcattcgtcggcgcctccccaggggctgctgcgccccctgcttyccgcgcgcccaccacgcacgctgctctgggagcagggccggcggcgccgccgcctcgcagcgattggttgaaccggaggttgttgytaggctaccagtgcgccctgagcctggggccccgcagtcccatcctctgtggcagatccatccctcactgcagacctaattccggyaccctgtgaacggcatcctcagcagcttaaattatcagccccaactgcccgcctttctatgatttttcatttcgcaagaggccatgtggagttggggaagagaagccttctgtttttatcctctgggtcatcttgaatagcgacttctctctctagacctcagtatcccgcttcagtttctggagttcattcattcatccattattcatgcctgcgtgcatgtttcttaagtgcccaccgtattccaggcactatattgagtgctagggacaaaagaatgaacaagacagagaccgtccttgccctcgtgaagaggggaacattatccacctaaacaaataaaataaacgcatgtacaattatcccttttcttccccctttgatgatttttctagcccctctttccccctactatatctgtagggtcccccaacttgacaggagagggagtgtctcccagtcaggcctacactactctgaaactggggtgcaccctcttactccaagctcgtattttgctcttttgattccacacatgagcctgaccacaccttgataaggatgtggggrcagggatcactgtctcctgttcagatgagcagtctgagagtctgaatcatcaaaatgccttgtcacataagaaattattgccatacccaatatttggtcatttactatgtgctggcactttaaaagctgtctgcctcatcataatccagtaaggtaggtattcttatactaattttacaggcaacaaagttgaggatgaaaggtgttatttaagtggccagtgatgatctagatagcatgtggtgaagctgggatttgaaccaaatctgcctggctccaaagcctaagctctttccaagaaatggatgtggtcatggaaagactctctgatcagctgggcacagtggctcatgcctgtaatccccacactttgggaggctgaratgggaggattgcttgagcccaggagtttgagaccagccttagcaacagagtgagaccctgtttctacaaaataaaaagaattatctggtatggtggcacatgctgtagttccagctactcaggaggctgaggtgggaggatcctttgaggagcctgggcaacagagggagaccctgtctctaaaaaaaaaaagtttaaattaaattwaaaaaagaaagactctctgagtggctgaaacttggaaacatagcttccaagtgccgttcaaaaatctcccagtctcaacatctttttacattttattttttagaggcagggtctcactctgtcatccaggctggagtgcagtggtgcaatcatggctcactgtggcctcgtccttccggactcaagtgatcctcccacctcaacctcctgagtagctgggactacagtggcatgccaccatgcctggctaatttaaattttttttttttttgtagagacaggggtcttgctatgttgccagagctgatctcaaactcccgggctcaagcgatcctcccatctcagcctcccaatgtgctgggattacaggcatgaaccaccacacccagcattgacccagcatcttatttacttatttttcttggcacattagactcataaaacctggtgagctgaccacagtaatcaatattgttaactctygctgtctatccatctatctgggatgatctcgccttcaagcttttattgggtaattaagtcaagtagctcttccttgggggcatctccattgctctcaggtttttatattccgttgttcacacactgagagccttggtgggcatagaatatggcccatctctcccctggaggaatttccagccctcasgggaggtttctgaggagcttcctatgggcaaagctcagtgacaggctattgtgagaggaggaggagaaccagatttaccctcagagaatcccctcctctgagcagaagtggatgtgcctagggtgggctgaggggtgggagcagtcaaccttgagtaccctgatcaggacacattgggtccgcggtgctgcttctaataaccttgctgtggttagtgtgggactctgtgtctcagagcctggcagcctgcagctcggaaggaggcctttaaatgggagaaggtgctggaaaatatggtaatacataaataagctaaatttatcccctttstcagcacccagcaattgctgtgcttaacacttaactttctaccagcatagatttgtttaaccagattagttgctgggagagagagaaaggagagagatagacagagacagagacaaagagacacagagaaagacagtcagagactttgaagacagacagmaacacacacacacacacacacacacacacacacacccctggagagaagtaagaagatgcagagataacagtatcctttggtgtgtggcttcagccagcagcaggagagctagactgagagaatcagacaacttcctgccctcttcctcccaggctacatgactggctagagcattgctaatttccagatagcaccattttcagatgtgagtactttggaatgtcgacactgtttgcattattttgtccactgttttgttcctgtcrcccaaccctacccctgaataggtgagagttgactgtagatgaataatatactaaagccaccattaaagtaagcattataagactttaaatatgcgtgcctttgacctagcatcctcacttctaggaatttatcctaaggaaaataagtatatggataaagaagctagcatgagattgttcattgcatcgytatttagaaaagcaatgaaacaaactaaatagccaaccactcttggtttcctgatcaataaataatggtataaccttacaacagctttccataccgcttttaaaattagattataggctgggtgcagtggttcatgcctgtaatcccagcactttgggagaccaaagtgggaggattgcttgagaccaggggttcaagaccaacctgggcaacataaggagaccctattttttttttttttttttttttgagacggagtctcgctctgtcgcccaggccggactgcggactgcagtggcgcartctcggctcactgcaagctccgcttcccgggttcacgccattctcctgcctcagcctcctgagtagctgggactacaggcgcccgccaccgcgcccggctaattttttttttttgtatttttagtagagacggggtttcaccttgttagccaggatggtctcgatctcctgacctcatgatccacccgcctcggcctcccaaagtgctgggattacaggcgtgagccaccrtgcccggctggagaccctatttttaaaaaaataaaaaaatcakctgggtgcggtggcacatgcctgtaatcccagctactcaagaggctgaggtgagaggattgcctgagccaggcattccagggtgcagtgagctatcatggtgtccagcttgggtgacagaacaaaactctatttgaaaaaacaaattaggttataaatggatatttgttgacctggaaaaacattcacaacatattaggtgaaagaagcaagttacaaatagtgtgtattatatgaccccttataagtatgaataaaaataaaatatttagcttaagaagacagaccaaatgttagtctctaggaggagggattccaagacattttaatttttttctttctgcttatctgcatttttaaaagtttttccacaataagcatgtctgatttttgtaataagaacaaatttccttgcttccctcccaggggtggcttctgctgggagatcaggcgttcctggctctcaggcctcatgggaaaagccattgacccttgccaggtgttaagctgctcactaagaattccctgccctggcttgactccccatcccagctggtgttatgggcgagacctcagtgatccaacaccttggtatccaaatgagcagttgccgcatcacctgtgagtgggttagctgctgccctcccttgaaggtaaacactgtttacctctgttggcacatggtaaggctaacctcactaaaaccgtagggcctttctgcctcccaggagcaccytcccctgtaggagggtgacaattacgatgctgcattgctcagggaggtccctgctacacatatgcaggtgtgattctgaaggttcgraaaaaaaaaaggctgtcaccatggcaacccaggcttgctcagcctcttcattcctgagatcagtccaagccccagggaaagaaggtggggtatggagtcagaaaaatcactgcctggctgcctgacctcaggcaagacacttagcttttctctgtgtcagtttctgcgtctgtaaaatggtgctgaagyttttcttactcacctccaggactggggtggaataatcggtaaaccataaaacacaggaggagtagggcatccttarttttggcttgtccccagattgccatgtgactttgggtaaatcacttaacctctctgtgtctcagstgctctatttataaataggcgagtaaggcacactgattacttcccggatatattgcaaggtgcctgtgagaatcccagaatctcaaagttggaaggaatcttagcccttagcactcatgcaggaatctttttgataaactctctgacagagatacttgcctagcctctgcctggttacctcctgtggcaaaaaactcatgaccgcacagcttcccatgtagccattgctacatgacactaaccataagaaagttctaccatatagcgtatcatagcatattttacaaataaatgtttgttttaaaaaagttagcaatcctttccagagctattttcactcctgattttcccaaaggcttgcacagggtagagatgagcaggggtcagcaaaaagcaggtgtsggctcggctgcagaagaagcttttggcttagtgtaatagmaggagcctgggctctggggtcacacatcctaggttgaaatgctactttacccacttacaaactggctgacgctgaccctgggaaagttatattacctatctgagcctcagtttcctgatcagtaaaaggaagatagaaatacctacctcccagtattgttgtgggaattaagcaagttagcacttcttattaagcttacaacccagacttccctggtggggttctggggacttggggtggggaagattacaccctcctctgccacccccgaatagcgcatctgcccactgagcaaatggcacaggcgagccttacatagtccatatctcagggtcatctccctctcagacctggaccagggccataaaggaaagatgatgcaatggtttcaagacaaagttcacctcctcctcatgattcaccggcccaaggccagcaccccttccctgcccacagactcagtgggcaccaagcaagtatcccagggcgtcacttaggaacaacktccaactgcaccagtgttttaataggaatctcatacaggaccccaaaaatgtcatctggcagtggacttccaggcagagtgacaagaagttagggaaagctattgggggttgggctaaagtgttcctttagctgttgatatgaaggtgtctgtcacgtaatgactcctggacaaaggtcaggatgcctgggtccagctccatcattgcctagctctgggctctccggagccagcgacttccttcctcaatatcttgcttccgtcatgkgcaagacagcaggccgattcctggggttttcccagcttccgaattctaggtttccccatttgttggattcagagatgagttggagaaaccaccctagacctcccttggcccctggccactgggtggcaccgaccaccccctcttctctgcttcctttgcagatgagtatctcagagtcctcaacgtgggtgtggccgaggtgaagaaatccttcctggggcccttgtccccgtcctgtaagatggtgcagatgatgaggcagtttctgtaccgggtcctgcccgaggactcctacaaggtcaccacggggaagctccatgtgagcctcacccgcttaacggacggggagaatgtggtggtttcagagttcacgtccaaggaggagctcattgaggcaagggggctgggctgggagggagggacacggagggggcgggggagggcggctcctgctctttctccacagctcaacccgatgccttatccacctgcctcacttccctagtccttcccttccttcatgcccccagagtctcgctgtgcaaggtgcagtgctagatgagatggacacagaagcccaggacgaaccaggcttgaccgccaccctcaatgcttcggccttcacatccatcctgcccggccccctgcgctaagcctggagcttcccagaggcccaggtgtgacttgcagagggcctgggtctccttcagggccttccaggctgggctgccatgcatccccccagaattactcccactttgtgggaacggtcaggggagaggggcccccatgtcccctttctgccccctctcttccagtggcccttgataagggattgaatggttaccaaatcagttaacacttagaaaagtgcacgctaatcctgagtgcgctgccctaagctcattaatattaattttagttatgaataatgattgctggaaagggccgcaggtaggtcccagtgtctttcgggacaaaggggttaagctgtgtggcctccttcccacatctccactctccttccttcccccacatrcaggggcttcgccactccatcctcatcccatactggcctggcagtaatcctggggatgagggatgaataggcagtgggcacagacaccacctccgtccctcaggccccctgggtttatcagcagccagctcttccagatctgcctcctcacgcccacccccrttctgacttcactgcccactgctgcagttttctcttcccggccctctcccccaccttccactcctaccatgccaaccctagcaaaccacacacaagccaggcctctgggtctttgcacctgccgctccctctgcctgggatcccctccctccttcccacactgctttgcctgctgctgaaacccagtccctcctgccagggcacttcccttcatcccctcccaccctgcctgcacccctcttgtggagccacggtgcccatgctcacctccaccatgcccctgtcaccccactgcaccgtcacccacttrctcactccctctcatagggcactcccaaaggtgggcctctcagcctcctttgcttccagggcctggcccagggctgacacacattaatggttgttgaatcccactggattcatgaaagttcagcatcagaaggaaccccraagctatggaggaycccctcctgctttaaagctgggacatcagggccagatggaccaagcaggttaccaaggacccaattagtgaaggccaggccaggaactgaactcggagctttgcttcccagtgtggcaccttcacctagaatttaaggaggtctgggctggtggtgggtggcccaggggctgacaggtgagctgtccccaccccacccccgggcctccagcatctcagccctgttctctccgcacaggccctatactgcagctgcttygtcccggtgtactgtggcctcatccccccgacttaccgcggtgtggtgagtgcttyggcatggtgaggggtgagatgggatccaagggacctcgggtccctgtgactcacacctgggggagcaggggggtggtctcagaatgcagcgggrggacctagagttggagagtttctcatgttgttactcagaattcccaatgyaggtggctttctgggcctttaagatgaacttctccagctggggtgggttcctctctggacccacctacccactgccaagccgggcaaatcaaggctccataggcttggcaggttttcccagacttgacagagcagaggagatgaagcactgggacctggaaactcaaatgatgaggatgttttctgaggcctgtaggccagggccttacagactttaatgtgcccttgaatcactcggggtctcgtaaaattatgcaagttctgatccaggcggtctgaggcagtgcctgagggtctgcgcccctaaccagcctcaggtgctgcccgtgctgctgrtgggtgggccacactctgagtggtgatggtctagctcatgccccctcctcattttatatgcagagaaagtcagggccagagactaggattcaggtagtagatggagcttgtattgcatgtcagccagccctgagagttagagcctcagtatttgttgtccttcgttcataggtgagaaaacagaagccccagaaaggaaggggcttgtgggtgaacaggtggtggggctgtagcagaggagcacgtctcctgctttacccagagtatgggtcccckgcacacagagccctgggagccccagtctcagcgccactaagatagtggagggaggatcagtgcaggacagagcaccgggctgggagtccagaggccaatgcagactcactaagtgaccaggggcacaccacgcacccaccaggacctccgtctccaggcttatcctgaggggtcttctggatcttccttgatgggcccttgaagctggtgccatrtcccatgggccatttygatgtaccccgagtggggctgagaactctggccccaagtgggcatttctcactctgcccccacagaggtacatcgatgggggcttcacgggcatgcagccctgtgccttctggaccgacrccatcaccatctccaccttcagtgggcagcaggacatctgtccccgggactgcccggccatcttccacgacttccgcatgttcaactgctccttccagttctccctggagaacatcgccaggatgacccacgcattgttccccccggacctggtggtgagaggcaggaggggtctggggagtagcagaaggtaccagggactaggggtggggttagagagccactggggcccactcaagttccatctgagtctcctcccctcaaatggtcctttaaacttcctcctagacctgcatcctggccttgctgctaactagctatgtgaccttgaacaagygcctcaagctctcccagcttcaayattctccccggtaaagcgagatgatgccagaagtgctgatagaaatattaactgaacccatccattcagacagttcatgtmccaaatcaaaggtcggcaarctgcagcccacgggccaaatctagcctatggcttgtttttgtacagcctgtgagctaagaaagggttttccatttttagagagttatgggggaaagaaaaaaagaagaaaaagaaaaagaacattaggcagagactgcatgtggccagcaaagcccaaaataagtatttactatctggccctttacagaaaaggctttgtgggcagtagctcatgtaatcctctagcatcctctatgatcaatattataactgtccccattttatagatgaagaaawtgaggctgtgagaggggacagcaacacagccaataaggggcagcccagagacctgaactcaggctccaaactttgctcttcatatggccccagtgcacctggttctgccatgagcaccccacactttcctcccaggggaggccgaggctccaccatgaatggtgtaactcatgaacggagcatcactggggcgtgtgatcaggaattgctcctcggttcttcttagcagayagtgagggatgggacactggatgggtacgttttgaaaagcccatcaaataaaattcaagagcaatgggagtagctgccctgggtcgggggaactgtggctcccttcctccccgcagccttggtaattctcctggtgcctccgcccacagatcctgcacgattactactaccgagggtacgaggatgcagttttgtacttgaggcggctgagtaagtaccggtggggccccaggtaagggcagtgttggagggtagggaaagttcaaacagtagaagggctgaatggaggggtattccccccagatttgtgacccggagacgcccttcacctgggagagctggaaatgggggtggggacctaacaggctgcatcgcccagcccagaccgctgggtccagaaagtaggatctccatgtaaagggggctttggggttaactaagggcacagtgtctaggacagttgtgcatgtatgcttatgaatgtaaaaactctatttaggaaatccagagttcagatcttcctggagaattccattttcatgtaatttcattctcttccactttattctctttctagtaaaatcacattattaatgtagaattggatgtcactagtttatatttgtgtaagactttgagtgacctattgatcagcaaatcacagagaagagcccttgccctatgtaggtttggaatggtggtccctccacctatatattctctgtgctttatcagggtggaagaaacaattccaatgacatgtcttttatgtgctaactccatggcaaacatctttgttaaaagaaatgaacaggactgggtgtggtggctcatgcctgtaatctcagcactgtaggagggcaaggcaggagaatcacttgagcccaggaatttgagaccagcctgggcgattgtgagattcccagctctacaagaaattaaacaattasctgagcatggtggcacacgcttatagccccagctacttgagatcaaggctgtagcgagccatgactgcaccactgtactctactctgggcaacagagtgagaccctgtctctaaaaaaagaaagaaatcaacaaaagctttgccatatttagaatcaattattttcagaaaaagggatcaccaggtcaaagggtttacctaatgttacatcagaagcattttccttgttgccacatgtctttgtgactgtcttttttggcagttgtataatattccatcatagctgtgcagaaaaatttgcttgatcattcctttgagtttccaaatgttcgtgattatgagtaattctgtggtaaactttttgtgtatgtagctttaaaaaatactctgtgggtgagattaaggggttggatgagattttcttcctaggaggtgctcacttatttttcccttcttcaaaattccttcctgcttcccaagctccccttatcctgtctctactttctcctgggtcctttctcccaacaaggggggtggagaggctggacggacaggagagcaggatggagaaaacctgggccctggaggcaagtagctctaaggcccccaycccacccacaagctgtgtgacctccggataattgcttcccctctctaaggcttggtttcctaatctgtaaaaaaaagggggtttagatcctarctcctgacacctactaactgtgtgatattgagcaggtaattaatctcctggggcctcagtttcctcatctgtaaaaggggccttatggttttattttgaagattaaaggagcaaagccacaagcccttatcacaatgctcaaataaatggtagctctcatgagaacgtcaaagtgctgagtcctagccacagtcagtcccgcctactgctgggtgaaatctgatggtggcacttcaggaatctgtccccaaaattgagccagtatatggatgggggcaggcttcttcaatggccctggaatcactccaagtaggaacagatacaactcctaaaggagaaatggtctcgtgctgactaccagctatttttgcttcctcttccgatttgccagtgtatggcacgggtttctcagcgcagatttcacctccaccacctcagtcctcttggatttggtgggactggatttttctctctgcatcagatgtgaacaggaactactgacacatactgagaaactgcagttggtctccagagccacactcttatccccacctgccatctgggaacagaaaatgggagtccgcccagcctcccctgggctgctttctgggtaggggtcacctccagcaggaaactacaccccaaaaggtgtcaccctccattcctcagctcacattctcacagcctctttctcctccctcccaagggaggagaattaattattcttgctgccaggcaagccactctgtctacactcggcccatccttgcagcggccttctgccaaagggaatggcagcgcaggctggcgtgcttgaaaatccgcattccccacacagatgtgtgaatgtgggtgctgagtgaggttggagctcagaggatgccatgtctaaaatatccatccggcattcaggcatgcctggccaaacctctcttccgccctcctcccccactcccttcttccctctcacagtttggtaagtgactctgtctctctgtacacacacacacacacacacacaccctgtgaaaccatcaccacaattaagttagtgaataattcgtcatccccaaaatttcctcatgccctttcgtgatccctcccaccttccctcaccccccgccattcccaagcaacccctgatctgctttctgccattatagattaattcactacaatgtgaactcttttttaaaaatctgaattctttcactctgcataattattctgagattcatccatgttgttgaatgtataaatagtttgttcctttttacgttccgtgccactgtatgaatgtaccacagctcatctaccaaaagagttgaatataccactgtatgcatataccacagcccatttacccagtcccctgttgatggacatttaggttattttcagatttgggctattatggataaagctgctatgaacactcacgcatgagtcttggtgtggacatatgctttcatttctcttgggtaaatacctagaaatggaatgacgggattgcatggtacattcatgtttaacatacatacacaaatattttaattgtggtaaaaaaacacgtaacaaattttaagcacacagttcagtagtgttaactatttcatattgttgtgcagcagatctctagaactttttcatcttgcaaaactgagcctttacacacattgatcaacaactcccccttttctcctcctccagcccccagcaaccaccatcccactttctgtgctgatgattttgactacactaggtacttcatataaatggaatcatgcggtatttgtctttttgtgactggcttatttaacttaacataatggcctcaaggttcatccatgttgtagctgtagcatgtgacaggattttcttccttttttgagacggagtctcgctctgttgtccaggctagagtgtggtggtgtgatctcagctcactgcaacctctgccacctgggttcaagcgattctcccgcctcagcctcctgagtacctgagactacaggcacacgccaccacgtccagctaatttttgtatttttagtagagacagggtttcaccatgttggccaggatggtctcgatctcctcacctcgtgatctgcctgcctcggcctcccaaagtgctgggattactggggtgagccaccgcgcctggccgattttcttcctttttagagctgaatatattccacatgttctttgtccatccatctgacaaaggacactggagttgcttccatctttcggctattgtggataatgctgcagtgcccatggatgtctcttccagatcctattcaattattttggatatataaccagaatatatgtttgactttttaataaactgccaaattgttttccaaagcagttgtaccatgtttcattcccaccagcagtggatgagcgttcccattcctccaaaacttttggggttttttttgtttttttgtctttttgtttttgtttttttttttgagatggagtctcgctctgtcacccaggctggagtgcagtggcatgatctcggctcactgcaagctccacctcctgggttcacaccattctcctgcctcagtctcccgagtagctgggactacaggcgcccgctaccacgcccagctaattttttgcatttttagtagagacggggtttcgccatgttggccaggatggtctcgatctcttgacctcgtgatccacccgcctcggcctcccaaagtgctgggattacaggcgtgagccactgcgcccggccaacttttggtatttttaattaatgctcagaatttttcattttagcccttctaacaggtgcatgtcggtaacttattgtggttttaatcagtattcctctaatgactaaygactttgagcatcttttcatttgtctatttgcctcccatagatcttctttggtgaagcattcgttccactcttttgtacatttctcacctagactcttaataagctttgtttttttagggtagttttagatttatggataacttgtgaaaataatacagggtgtttgtctcacatctgttagacgttacagaatgatacatatataacacggtattcagtccagtacatttgttacaactcatgaaccaatcttgacatattattaactaagagccattgcttattcagattttctcagtttttacctaatttctttttctgttccaggaccccccacccagggatcacattacattttgttgtcacgtctcctcagtttcctcttgcctataacagtttctcagcacttttcttattcttgtgtgtgtgtgtgtgtgtgtgtgtgtgtgtgtgtgtgtgtgtgagagagagagagagagagagagagagacagacagagtcttgctgtgtcacccaggctggagtgcagtggtgcaatcttggctcactgcaagctccacctcccgggttcatgccattctcctgcctcagcctcccgagtagctggggctacaggtgcmtgccactacccccggctaattttttgtatttttagtagagatggggtttcaccgtgttagccaggatggtctcaatctcctgacctcataatccgcccgcctcggcctcccaaagtgctgggattacagagacttttcttattcttgatgaccttgacagagttgactatcggtcaggtattttgtagaacgtccctcagttggggtttgtctgatgtttttctcaagattaagctggggttktgagttctggggaggagaccacagaggtaaggtgctattcacatcacgttacctcatgggcacgtgctgccaacatgacgtatccctgctgatgttgaccatgaccgcctggccgaggtagtgtccatcgggtttctccattgtgaagtactctttctccctctatccttactgcagtttttggaagaaagtcactgtgcacagctcatatttaaggagtgagaagttatgctccacttcctaaagggtcaagcatctacataaattactaagaattcttctgcaggggagctttctctcttctccctgatttacttacctacgtaatatatgtttatatcagtatggattcatggttatgttatactttgggttattattcaatactactttattgtgttcttcaaattgttccagctttggccattgggagccctttcagttggctctttcacacattttaaaaactgaattgtttgttttcttatttaagggctgttatgtggcctagataaacgccatccccccgcccccccacccacccactatttttgagacaggttctcactctgtcacccaagctggagcgtagtggcacgatcatggctcactgaagcttcagcttcccaggctcargcaaccctttcacctttctcaatgagtcttacagccacagtgaccttctcagaaccagcctcagctgattacctcccctgcctaamagtcatgctacaataatgcttgccatgaaaactaaggatcctagctgctgcctacagccctgacatggtccggcccctgccrcctcctcagcctcctcccccagcacagtacccccgccccacactgacctttcaggcccccgaccacctggtgtgtcctcaaactttgtggcctttgtgtgtgctgttccctctgctgaaacaccctcaccaccccgccctgaccatcctgggccacgtacccttcagatctctactcactgscaatccctcagatgacctgccctctctcacagcaccacattcctctcttcctgcacttgcctcagttgaaactctagataatttgggtgggcaacgcctgcttccccacactacaccgtaagtgccagaaaccatcacgtttgttttcactcactrtaaattcaagtaagtacagaaagacctttgaaaagcactgttcctgtttaggaaaataactcaagaaaccatttttgcaaaggccatgctgctgccagrgctgagtaacaccccatgctattgtttatcctagatgctgtttatcttaattcttcctccaagagagtgattttcccccgggtggaagtgtactgccagatagaactcgcccttggcaatgrgtgccctgaacgcagtcaaccaagccttcgagcacggcaggccagtctggaaggagccacacaacctcacaaggagtgggttcccaaaggggatggaaggggcagccatggtccgcctgtgtcccaacctgtgcagacacttgaattcacatgcgagtcacctgtttcagcaccagtctctccacttgagcagccacctgcacagccactggcctcttcaactccactttctctaagtggcatgccacctgtatcattcccagctgtgcacaagccacccagctccacacctggttcatcactgcccaccccaccacctggactgtcacctctgtcacctcagcagcaggtacaaccgtctggatcaccagccagatccctacactctcaggcacccacttcacmcaggccatccctggggccttcaactgtgggggcacctcaaacactgccccgaagttctctttcagccttccctgctcagccacctgtggaggaactaggccaagaacagccccaaggtatggacccttctggcttgttatgactttctcatgcctggagccccttggcaagcgagcaaggacaccagggctgataaccgcttctttaggggtgcgtggctgaagttagcagtgagctttagcatctctgtccattatgaggacagtccgccacaagggggcagtgtaatagacattggttcatttcccttggtgcagtgcttctcaaagtgcgatccccctaccggcagcaaaagcatcacctgggaacttgctagaaattacagttctcaggtcctactgcagacctactaaattaccaactttggaggtgcggcccagctgccttttttacaagccctccaggtgattttttgcctgctcacatttgagaccgctgggccagtagatttttactgtgaaacctgctgtgctgggcrtgctactcaaagagtggtccgcagaccaacccagccctcaactgtgtgttactagcccaccacggagggtgtgcagaaattaagagtaatcatttagaaacgtttatagcactaaggtatttccacaacatcccggagcttgaccattttttactaattcatttgcattgtatttcacaaaattactagtttgttatagactacaaagaaatttttttttttagatggaatctcgctctgtcgcccaggctagagtgcagtggcgtgatcttggctcactgccagttctgcctcccgggttcacgccattcttctgcctcagcctcccgagtagctgggactacagatgcccgccaccacgcctggctaattttttgtatttttagtaaagacaggtttcactgtgttagccaggatggtctcaatctcctgactttgtgatctgcccgccttggcctcccaaagtgctgggactacaggcgtgagccaccrcgcccagccagaaatttttaaaaaactgtttccttactactacagacggtttcagaagcaccactatagggcctgcaaagataaaacgttctcaattccttactcaggaaatctccctttcagcagaggagataacagggatactaacctcaaaaatacaatcagggactgggtgtggtcactcacacctgtaattccagcactttgggaggccaaagcgggtggatcacctgaggtcaggagttcaagaccagcctgaccaacatggtgaaaccccatctctactaaatacaaaaaaatcagccaaacttggtggtgcatgcctgtaatcccagctacttgggaggctgaggcaggataatcgcttgaacccaggaggtggaggttgcagggagccaagattgtgccattgcactccagcctgggcaacaagagtgaaactccatttaaaaaatatatatatatcagaagtattaagtactatataactaataaaaacacagtgttggagggtattcgtagagaataagaccacttatctctggggcagtatgaaaagcttcttggaggtgacaggtgagcttaaatgggcaggattttgaacatcgtggtttgtgggattggatgggttggagtagaaagagcatttccgattttgtttatttaaaatgctcaggtgcagtgmaggaatgtgcagggtactttcaaggtactttaggaaggagaggacttgtgtgtggccaccatggatggtctgggtggagacagagggacagagacccaaatgaaggactgaagccagattgtagggtgctcatggtcctcagccaaacttccagagctattatggtaaacgtcacagatcggcaatgtctcctcrtctgggaattagccccaacttggtagagatgccctttctttggaacaggtttactttgactcttttaatgagacaaaaacaaaacaccattaagaaaattaggctgtgactcatgcctttgagaggcagaggcaggcaagtcactttcagtcaggagttcgagaccagcctagccaacgtggtgaaaccccatctctactaaaaatacaaaaaattagccgggcatggtggcaagtacctgcagtcccagctactcaagaggctgaggcaggaggatcacttgaacctgggaggcggaggttgcagtgagtagagatcgtgccactgcactccagcctgggcgacagagtgagactccgtctcaggaaaaaaaaaaaaaaaaaaaaaagtcagaaaattgggcgcagtgttttacctgctctcttatttcctgttaaatacaaaacacttgttttacattaaccacacctgtgcatgaaggcggccatcttcaggtacctgagcaatcctgcaccccaagtcggcattcctcactcatatcgggggtggatagagggcatatatagtctagtgattctctactgggagtgattttgtctccaggagacatttagcaatgtctgcagacattttggttgtcacctagtggttacaggctggggwcamtgaaaaatatcctgtagtgcacagaagtctctgcacaaagtgctttctgaccgttagtgtcaatagcatgtactgagattgagaagccatgttatagcttacagctgagcctcaatggtgacatcctaggccatctatgtgagttaggcagagctgagaccccctagagcaagtttatccaacccgcggcccagatggttctgaatgcaccagtctataaaaaattcattaactttcttaaaacattgtgagattttttttggattttttttcagctcatcagctatcattactgttagtgtattttatgtgtggcccaagacaattcttcttccagtgtggcccaaggaagccaaaagattggacacccctgccctagagtttagtggtatcagtcatttaatgatggccattggtggcattggggaacaggaaaattgttaaaagccctaggaatatccaaaaacaaaaggacaagcctcattgtgaatagatttgggagagttagggacatacaacaagtctctaacaaaataacttcagaagaacccacatatactttatattacctttatttatatataatacataattacatattaaccttcatrtattatgtatccccatactcattaaaaacatgtaaagagcttacttaagagtaatggccatgaaactattaatactctgttctaagaaacaaacaaaaagcattacatgaagcatgtgatggaaagtccaggccccttcaggggattttcctgaaaaccttccctaacatgctgctttctgcgagggagctatttcttttcttttccttatttttctttacttttctctttttttttttttttttttttggkggkggaggaggagacagtatctcactcccggctcactgcactctcaacttttgaggctcaggtgattctcttacctcagcctcccgagtagctgagatcacaggcatgcactacaacacccagctaaatttttgtatttttagtagagacagggtttcaccatgttggccagactggtctcaaattcctggcctcaagtgatctgcccgccttggcctcccaaagcgccgggattacaggcatgagccaccgggcctgcccctgggagttgtttctaatgttccaccaagggtccgagtcagccgctccacagatgccgygggcctgcgtctcagtcaagtcccacgacatgactctggttgtaaagatgagaatttgaggacaagagagttctttgctgtttttaaacattctcatttactgactattgctatttcaaaaatgactccatatcccccctccccatctcactcccgtttcctatatctttacttttagctgtagctcttcttgtctcttcaaaaccaaaaagcgccgtgcctctggttcatgtgaaggaaaccgtcagcaagccttatgtaaygtaagtttccccttcgtggagcacgctctttcctttggacggaagaagcaagcccggctaagcgatatcttccaccaccttagctgccccaggaactctgggatccttttctggtgtgtgtgattgtgtgattccaggtccacccctttacatctcacaaagctgccttctcttgttcagttagggcagtgtgtggggaaggagcctgtccgtggtgatgatgtcattctcttctcctgcacactggggatgctccttctctgagtgcagtgcaagaatgtgcatcccctgccctcatattttactctctggtgatgccacagttccaagagggcctgcaggcatcctacctcccagccttaggtagctcctgcatgaaatgaattaagggtctctatcaaaggccttccttactccgaactattttctattagcatgataatgacctgatagtactagactgtagactgtccccagaaaatcttttttattatgcacatcaagtgtctgggttgcataacatacactccattatatctttgcaataactatgagaggacctggggatctgcttttttaaraacttccctgaggaccacattacccaggctcccttgctggctgaatgccgtttgtactggtggtgggggaggcacagcaggagatcagaagttgggtcaagggtatttctccccacaaccccagcccccctctcatccctccctgccttgggaccactctggcagtagctgggtttctccatgaccacagctgcaggtattgagagagcagggcctgaggcattcctgcttttaatgtttgcactctctctcacatcaagcatattaaaatttacctgcttcccacattaagtataattttaaccataaaactttttgaaagagtttgtataaatttaacaattttgagcttaggcataagttatgcattttgttcacataatttaaacttttwtgcatttacatataactctataaaagtcggagtttcatttgactcatgggcatgatgttacttagataaatattcattgattatattttaaaaaaagtttgctgggaaatccaatcctcagccagggttgagaaccacagmgcgggtgtgtccacctgcggagctgagcaggccaccatgttggaggaccgagrtcaggcccataatgaaccatctacttaatctctttgcctagggagagccctgctgaagactcaaactgggtgaataaggtcttcaagaagaacaagcaaaagacaagtggcaccagaaaaggcttcccaagacatycgggatccaaaaamccaagcagcaaagtgcagtgagcatgtctaatgttccttaaatcccacggagaggagcagctttgggaactgtgttcagagagattccgaggaatagaggagagtgtaagggagtagggggtgcagtgggagattgggctttggaacagacacatccgacataaaattcctgctctgccacagctccactcagggatcatggttgggacacttgctctccctgagcctccatttcctgtaaaatggggatgataccacttcataaagttgtgagagttaaatgtgatcgatgatgtaaattgcttcatagaatgcagaatgtgtaatagctcacaataagtaggtattatgtttacatattatgtttgtatttatgctacttaaatacaaaactggacaggccaggcatggtggctcatgcctgtaatcccagcactttgggaggctgaggtaggtggaaaacctgaggtcaggagttcaagaacagcctgaccaacatggtgaaactccatctctactaaaaatacmaaaattaaccaggcttgatggtgtgcacctgtaatctcagctactcgggaggctgaggcaagagaatcgcttgaacccaggaggcagaggttgcagtgcaccaagactgcgccattgcactccagcccgggcaacaagagcgaaaccccatctcgaaaaaaaacaaaacaaaactagacaagtgagtgcctacgtgacactcaaatgttgccagcatacagttaagggccctagtcaatgtaggcctgcttcttatagctttttgactatattatgctgtctttgacttagtcagtcaacacttattgagcacctactaagtgccaaacactctcctggactctggcaaaataaaaaatgaattaaaactctatccccaagtttcaacagtttactcctagtctaactttagatcaaagataagactaaaacctaagaatctgatgaactttgagtcccacctaaaccaagttttaatttttttaccgagtcatcatattttaagtaaagccccatgcatgtatacaaacagactcgcaaattcaaaatgagagcctcagattcaaaccaagtcgggtattatttacagttatttcattgggttatcaaagtattttctgaattggccaggcatgttgacatgtgccggtagtcccagctattcgggaggctgaggcaggaggattgcttgagcccaggagttggagtctgggctgggcaacatagtattctctgaatggaacagaccygcactgctatataatttgcttcaagtctttgttggtcagaaaaacctctaatcattctgarcaacatccttcctggttgttcttgtcccaagtggggtccctggatgggcacagggatttatcagacagacaagggtcagaggctcacccggcggccaaaggctcatctcgaagtctaagcaatgcacttgatgagtggtgggaagcagtatggtagcggagattctgagagctgctgcaggaagtggagcaaaccacatgttctttctggatgacaggtaggtaagggagggtgcaggacggcagctcgaggtccctgggttcatgggatcaacaatcccagcctgggattcttctcactcattcttgatctccagccccaacasttccctgacctttgagtgtccttatctctgtctctaggagctcatggtcacgttcggccttgggaagccacggatctgcggtgggtgtggggagcctccctgggactaggagcactatctggaagccaagcccaggctccagttccttgattccagggccagctctcttcccactgcagcagagaagcgggaactgtgcaattcagcaagagccactttggttaacaaaccttctgggaatgaaggtgctttacaaagaagcaggctgtgataaaaacaaacaagacaacattcataaactgtgggaagcattgttgtcattgggtcacacctcctgcaccaggcaggtggttgtctgctgcgttcctttacagaacagatgctgagcctgcctggaggtggcaatttaccaatcratggtcttaagcaattccaaaggctggggtaaggggtagaaaagagaagctcaaaaatgttagggatggagaaggggggagtgattcaggaagaggagaaacctgttcatttcctcccaaattacaaccactgtcacatccatggctagtcctgtgcaaacttccagtccccagctgatatccctgcagacaagtagagagaggctagaacaaaagctaaagtgtagatgtcccatacactaatcartgttgttttttaatcagaggttgaaattcatactctgatgcaaactgtattagtcagttgttgctgctatgataacactgcataacaaacaaccccccaaatctcagtggattacaaggacaaacatttgtgtttctctttcatgggcctatgtgttggctgggatagctctatttaggctgcaggctgggttaagtctgctccaggaccctttcattctaggaacggcagtgatgccagacttgctcttctcctggagcttgggtgggtgtacgcatcagcctagctttcctctgctagccttggctctcctccagtaagggttccgtggtcatccgactctggattgtgtcactggcctcaaaatgaagagacagagtgagaaattgagaggctgcctacaggctacaaatggagaaggaggactccatcctgcccccaaatcctccaaattcctaccaagtctgtgagatgccccaagtttccaccataaaagatccttttctttgagtttctatggaatttcccccattccgatgtgaatgtaataatatagctacaacttacatagtacttacgtgcccagcaccatggcacagagaggttaagtaacatgcccgaagctacacagttggtaggtggcagagccaggatcccaattcaggttatctgtcaccagtgtcttgatgttccaacttagtgatacagcctacgagggtggtgggagcactggggtgggagtcagaagtcacaggggttagcactggtttctctattctggcaagttactttacttagtgggagtttcagtttctctctataacattcaccctgccttcaacccatggttatttgggacttaactgagaagctgaatgtggaagcatcctgtgtaattctggttaacaagacatgtcagaaccttatgaccagtgcccaggcctgtgtgggacatttgggagggtcccggggcagtgtgtaggactggggcaccaagagaaaggagcagagagagggtatctgaatgcatggttctgcctaggagcttttaggaatgcagattcttgggctcaccctgcacctactgaatcggaaatggggctggggcccagcggtgtgtatttcacatagtccaccagatgactgatgcacgctggagtttgagaaccactggattactatggaatagaagcacagaggagaggcagctaattcactctgttagcttggggatctcagggaacctggtggaggtgtggaagatgagcagaagttagtcagactgaggataagggtgtgggagggtattccaggcacacgggatggcccagaacaaggaaatagtctatgcaagcagttaactgcagttgcaaggatggaggtagcggagaggcctggaagtgaacttggagatgtggtggaaggtaggtcaggctgccttggatgaccggctaatgaggctggacttcccgtgtggtgctgcagagtcattgcagggtctaagcaacagaatgatagatttgaaaattacggagattttaaaattatccaagaatgtacaagtccacatcccagcatttctctgggctcggcaagtgtcttcctccaatttcctagagagggcaagtaacttgccccaagtgacacaggaggtggaggcaagtcttggaagtgaggtcttctgattctcccttttgtctcccttcttttcacctgttcttcctyggcttctcctatccaggtctgctccctgcccactcaacttccctctgctctccacttctgagacagtttgggtcacctacagacctcatcccagccggatccaggaatgctgccctgaagtgtggaattcctwaggatgaccttggaaggcaratactgcctgtcctgttctgggatgctgtggtgactcctgggtctcattgatccagctccttttattctcccaccttcccttcctggtcatagtcaaggtcaacactagcccaggcagtaccttttatactaagaaaatagcacctcttcctggagaacctgactaccagccgctggaaaattgtcataatatgctgattttgttagagcaagacacttgactgacaactgctagaaaactacaaagaacatgcacagacatgcataagtctgcgaatcgcctaccccttttatatggcactgtacccttgtatagtgtaaaatctgcacaactgtactcagccatccggagaccacttcagccccatccccttcctaaaaaaacaagtatcagttgaactttcatacatggaatgatgtttcaaacacccttttatcacctcccactggagattacatttgcaagcagcaaaagacccctgtgtaatgaaatgaaccccctaactggcttttggtgtagcttgagatttccaatttccatgcattggctataacaggcctggctacctgctgmgggttgcccaaggtgtatgaacctgtaagggtgatccccggtggaactaaggttagggaagtcctagatgggggatttcctaggaagctgtgagccgagagaragaacgggagctggaacgggagagaacctgaggaccctgaggccaagcctgcttctcactgctgtccggcacactcccctgactctgggcccttttgaggaccaggggcaacacctattcccagccccgatggtgcacaagatctgtttcccttccagggtgagcatctcagcttcctgcgatcctttcaacccttccactaccctactctggacagactgatggatgccagcactgatcggcactcatggaccttcctctcaaccttggcctgagcttgcttctttgagatgagccagatcatttctagtctccccaggatcctgtccaagggcaaaactcttgggggcccagcaggactgagccaacgacacgcttcctctttcttgtggtggcaggagcccaagttctggttgtttggtttttaattcttacagtgtactaacggcttggcctgagctggtcactggaatcgctggctgaatttggtcaggcagcccaggcattgagmtctttagagctcccccgggattatgtggtgctgtggtgttgagacaggctgccctggagtcctgggtggctgtagaggaagaaggaggccaaatgtccctcccctgcagccaacacaaatgagggctctctgtctgctgttcacacctcagtgaaaatgttccgtgaggaggacaacttcagcctcaatttttccagcctgtccagaaaataattgcccccctcctycccagagagcagacaacctccaggtcccgccaggcccagcaaggaagccccagctgcccacaggcctcaggtacatttgcttaccaaatcctgaaatgcaaaacccagaatgaatgggtggaggaccatactaarctgccctttggagcctgaggagaccatatgcaaatttaagcctggtggggctggggatttagagggttggggcttggctgcggcaacagaccccacttaacacagccattccagggaacaaaatgtacttttgagaccctgaaaatggtcaaagtcccaggggtcttgcatcctctgcctactctggttgatctgtggccacaccagtcaaaggaagcagctggaggtgtgtactgkgggggagactgactagagaggcccgcccggccgcaggcctttcttccaggagtggcctccatgtttgcagaagcctgaggcctgggaaactagggggaggagagtgtcctctcttgcacagcccaggaatgcttgttccctgggacccaaggaagactcgaacttaatcataattattgttttaattcaaagtctgtatttagagcccagatgctcttaatgtcaattatgttaaactattaatacatcctcttgcatacttcccttcacttggtttaattatttttcttgttttgaggtaattaaaataattgttcttacattagtttcagagttgccagataaaatagaggacattttgttaaatttgaatttcagataaacaatgaataattatttagtaggagtaygtcctcaatattgcaattatttgtaattttctgaaattcaaatttaactgggtctcctgtatttttatgtgctaaatctggcaacccaaattagcttctgtctcctttttctctttttttttttctgatcaacatgaacgaattgttacatgtcagccactgtgctttgaaactgggaggcctcacttgtgcccggggcaacaccagaatgctgtcttttcttccaggcagcacctctgactgatacccacagcacaaccccgctgtaacccagctaacacctccagctcaaccagttctcagctgaccccattatctctgactcacccacttaggcttctgacttctcagagggagggaattaggttaattatgttgtaatgttacttgcccacctttttaaagccatgcaaagcagcaggacctctatgcaccccagtgctcttgtaaaaaccatctgtgttgctctacatacttgccagcacttgggggaaaaaga

SEQ ID NO: 9845 - DNA, 66686 bp, Homo sapiens
cgagcctatgcgcctacaagctgggatctcttgagtcagacagctgaggccaaagactggcatcaccctgtggagcagcgagtgtgggggagatttgggctgggtgctctgttgcctttcaggagatggctcttaccctatggtgtgatgcctgagcacggctcattcccactgaagaaaagatttgttatggttcatgaatgagtgcccactaggacaggggtgaaactaggagtgttccagggatggacaagtccctggatgaagaaagkgagaccctcacctgatgtcaggcttaccaatgaccttgggaggggatggatagggaagcaaggtctgggtgaagatctagttctcatcttctaggaaatgggggtggccctcaggacagataagctcctttgcaaatgtacagacatcttgcgaggagagatacacgggggagggaaggcagagcccacytaggccaaaacatcattgtgggctttaagtttcaaactaggcttttaaaagtcgacaacagttaaggctagtgttgtggtgtacacctgtagtcccagccactggggaggctgaggtaggaggatctcttgagcccaggagttcaagccttcagtgagctatgatcatgtcactgcactccagcctgagtgacagagcaagactccgactctaaaataaaattttaaaaaattcaaccaggtaaatctatagggttaaagctaaaaaaatataaaaggcatatagaaaagtctccccacattcctctacccccatctactccacctacccccagaaaacagaaccaytattatgagtagatctttgtgtagtttccgagaaatttttatgcagatataaataaatattttttgccttctttctccacaaatgctggcatactctacatgccattctgcactttgaattttcttttttctttttctttttgagacagagtctcgcactgtcacccaggctggagtgcagtagcaccatctcggctcactgcaacctccacctcccgggttcaagcaattctcctacctctgcctcccaagtagctgggattacaggtgcccaccactatgcctggctaattttctgtatttctaatagagacagggtttcactatgttggcaaggctggtcttgaactcctgacctcatgatccgcctgccttagcctcccaaagtgctgggattacaggcgtgagccactgcacccggccactttgacttttcagttgaacactgtatcccagggaccttcccacatcagtgtatgcagagtttccttgttccgttttatggctgtacactgttccacttcatgattagctggaccataattttcttyaccattcccccaacagagggcactaagtgctttccaaccttttttaatgtaaacaatgccaccatgaaatgarcaagctggtatacctttcacttttcggggtgcggctctatcatcaggataaagataaatttctagaagggaaacagctggatcagagtgggtgcattggtagctctgagaggtattcataaatagttctccaaaaaggagacaccaatttacactcccttcagcaagtaggggggtgttttactttttctttttgagatggagtctcgctcctcgcccaggctggagtgccgtggctsgatctcggctcactgcagcctctgactcccgggttcaagcaattctcctgcctcagcctcccaagtagctgggattacaggcacccccaccacgcctgactcattttttgtatttttagtagagtcaaggttttaccatgttggccaggctggtcttgaactcctgacttcaggtgacccatctgtctcagcctcccaaagtgctgggattacaggtgtgagccattgcacgcagtcgtcttactcttaacatacccaaagtgttcaacttttcttccaagtctgcctctcctccttctgtcaccaccatcacccatttgctcaagtctgaaggcaggacgccacctttacacctccacccttgcaccccagcagaacgccctgacagtacttctagaagaatctgtcccttcctgccttcactctggttacatctggagttagcctcagcccctctcacctggacacctgtgcaggtcccctgcctctccactctccaccctcctcgccagcccaccccatcctccacactgcaagccaaggggctacaaatgtcgcagccgggtgggctcactctcagcccatcatagggctgagatccctctgcaggatccaggctgtttggcatatccctcaaaacccaggccctgctgtaaggcctggacygggtggggtcctagaggtcatctccctgcacccatgtgaagcttcygagcatttgtccttggggttttgccccatggcatcccagagccacscaggcactatgttcacctcctgctgcccttcaagatgaacaagaagaagagaaacaaagggagttcgccasaggcctgagtgtggaggagacagagaaagaacagcacagaaaagagaggccaggaaggccccagatgccaggtcaggttcatttcatgtagaaatcacttcagcagattgctctgctaaagagaagaaaatacacttaacatgatgcatggcccccgcttggctcaaagctgattgcatctctaggctagcgacaagctggcagagcttattaaaaacagtgcacatgattctctgcccaagctcagagccctttccctctgagccactcagggcatttcccagtgtgggtgaggaagtgtgcaaggcctggtagaccttagaytgcatggctgcagtttctgtaactattgttcatcctgagaagtgaaggtttggaaaactaaatgaagacacccaagaatgccatctgctttcttgaggcattggttcaatgtttactcagcaaatgtgcatcgtgctcctgccctgcactgggctgagctgggagcaggattagacgctaagacaaagtcatggagaagtccrgtgccatgagctctgcaggaaagatggacccagggctctgtgggcagacattgggcaggaagaatgatgaggctgtaaatcctgagaatgcactccctcccgcagacattctcagagtcccagagtgttagggggcaggaggaattccagctgtggttctggaggattgttaaacctttttggtgtgtttcctactctgaggcatgtttgttttactcacaatgatgatgcaattctccaattacctagcaactatactaagactctaaagaaaaaggcaggttyttccaatacatagataagtcccaggtggaaggacaagaccccagcctggagaggtgtttgtatcgggaggagaatgagaacgtaaatccctgaagctgggagtgggtctggtgctgagcaaaccctttacagttctggtcagtgctgaaatttacttcaaggtcctttctcagttgctggggcatttgaaggggatgctcccagagatctgggctggtaatcatttccctgccgaggtgtcaccagaaatggatggccctcacattgccacacctgtctccctaggttgccctccttaatcacttcgaaacagagccgtctgccagggcagtgggcaatgggacactcctgggcagctccatcatctctagccaagaatcatttggactggccagaactgcactctggtcccagccagaggaccccagttccaaagtccttcattgtgcaaacaaagagacaaaagagatgccttgcaakttgaggcaagtcaggctcagaaggagaccatgaaattcagcagcatctgtgggagkggcagggggtgcagagaggataggggaaagggaggaatcagcagctcctgatcccctccatgtgccagactttgcaagtggctttgyttccacaaacccgccatgcctctagcaggcagcaccgattatcctgattcacagcttggaagcagggacagacagcatggataactcgcccaagatcaccccagggaaaactgggaatttgtcttagttcattcaggcttctataacaaaacagcacagacagggtggcttataaacaacagaaatgtgttgctcacagttctggaagctggaagtccaagatcaaggcactggcagattccatgcctggtgagggtctactttctggttcctgtgtcctcacatggtggaagggaggagggggccctctgtgacctaatctttcataatgacaccaatcccattcatgagggctccactcttctgacctaatcaccccttagaggccccactttctaataccattaccttgcagggtatgggttcaacatacaaattttggcggggtcgggggggtggtgcggaatacaagcaatcaggccatagcagagtaaaacccaaatatccccaactctaatgtctagacctcccctgtaaaaccatatgcaggatctactagacagaacgtgtgtcagactgagtgcacactcctgggaactgtgagcttatataaaaattcacatcatggccttttaactgtacccattaactcaagaccccttgtctccaaacctcaactttgactagttagagaatcayacagaaatcattataaagtgcttagaacatcagagttttcacgtggtgactaatacttttattgacttatttttattgatacataatatttgtaygtattgatggggtacatgtgctattttgttacatgtgcagaatgtgtgatatcgagttggggtatttaggctatctatcccctccagtatttatcatttcttttcttctttccttctctctctctcttttctttctctctctctctcttttttcyttttttttttttttttttttgacagagtctctctctgtcacccaggctagagggcagtggcacgacctcagttcactgcaacctccacctcccaggttcaagggattctcctgcctcagcctcccaagtagctgggattacaagcatccgccaccacaccgggctaattttttgtatttttagtagagacagggtttcaygatgttggccagactggtcttgatctcctgacctygggtgatcaaccctcctcggcctcccaaagtgctgggattacaggtgtgagccaccacacccagcctgtataatcatttctatgggcaaacacatttatcaaaccacctccatcctctaacatttgttttttctcagacgtgagatcctatttgtaggactataacaacaaggaactttattaatatgatgtctagagaaygaaagaggcacatgtgccctagaggaagagccgatgtcctctgtgagttctcctctatcaggggtcaggttggatgaaatctaacccccacctgcctttgtaaataaagttttattggaacacagccacacccattcatctgtgtcacatctacggctgctttgtcactacaacagcwaagttgagtagttgcagcacagactttgcgtggcccacaaagctgaaaatattcatggtctgggcctttacagaaaaggtttgctgaccccagtgctgaatcactatgggattgcctgtgcaggagctgtgccagctgtgttcacataatgcatcctgctttcattcaccaasctcccttccgactacaaaactctgccattctctgatgcaggagatgggactcaagrccacaccgtgcacttctccgtaaagccacctcctggaccasttgggtttcttgctccttttccttctgaagcaatcctctctctcccatkaggccccctgagcgcactaagcagaggtgccgcctctgagtggaatgtgccaggccccagagctgcctctgagtctgcaggagtgcagagtgggcagagggctctctctgctgttttccatcagggygtgtcccatctcagtctaacagggaggtgcccagaaaataggtggaggtgagggccactcagcccagtggccctctgagctgttccttcttgaccggcacacacagctcgcttcttcactttcttttccatccactgccggacccaagccagccttccagggagcagccatgccttacctctaccgggccccagggcctcaggcacacccggttcccaaggacgcccggatcacccactcctcaggccagagctttgagcaaatgaggcaggagtgcctgcagagaggcaccctgtttgaggatgcagacttcccagccagcaattcctccctgttctacagtgagaggccgcagatcccctttgtgtggaaacgaccaggggtgagtggggygagcaggggaaggagcayagatgaggccgaggytcagcagcccccgcaggaagtggaaacaggggtgctggggaggggccggctacgctcagtgcaactgagktgcatcatcccagtctaccgtggaaagctttgcagtttggaggcagaaaataatgtacaggcctgggatgctctgcggtggggaccsggggcatctggttgtacccgctccccggctccaagctgtctgactccyaccgaggctgaggacctggagtcagagtgggtcttgtcagcaggtgataggcacgaatcaaaaccttatccacaaggacaggcccccaccctgtgtgtggtaacactgagatcacgttatgcacagtgttctgtggcttctggcccagagctgagggtgctcagtgtggatggatgtttggctcagcaaggtctcagcaaccgggtgacagatggaatacaagggaagcaggaatcttctcccragaaccatgcaccccccattcccagagatcagggtgaacagtgccccacctctgacagtctggaggtgtcgtcccaagaggcaccagctggtcactgggtcccaagaggtgctagcttgtgcctgggacgccatgtcaatatttgcggtgctggattagtcagggctctacctctgacccggcgccagctgggctggcttccattccctccaggtgkgtacgggcctgggagtggctcctgtggggtccggttgcttttgsgcaaggaggggcagtacaagggatgctggtcctacaagtgagatcctgagtgccygtcttatcctgacaatttgtctcatgcatatagtcatatcacttcatttccctgagcctcagtctcctcacctgtaaaatgggaacaataatggctaaygcaggccaatgtctagcacacagaaggtttccagtacattacagctattgtcacattattactattactgatactattattatcatcattacaatgattattagctctgartctcatcttacatatgagtagcaaaggactcatcataactacctcctcactatctcccaacattaaaataatgttgatgattaaaaacaattttttttaacgcacattcacaaaacttctgggctcttcaggggcagggccaaagtgaacctaagtgggtgtttccgaagtggtaagggttttattgctatttcctgcagtaggcagtgtggggtgtatgtgtgtgcacgcacttgtgtgtgtaggaatttgactgtgtatgtgcatgtgtgtgactgtgtgcacatgtgtgtggatatgcataggcgtgtatgtggggggtgggtgactgcatgcataggcacacaggtgctttgatcttcacctgccaggtaattgatcccacaaggtgccatgttcatggggaaatcacagtgagcattcagtggccctatcggagttggggtgaaagctcccaggcaccttcctcaccgaagccacgctgtgattgtttttggttctctgcatatggccaattgcagtgtgaggtcacggyactggcagatcacgtggggttgcactttacagacaggattagtaggtcatgctctgctaagtaagaaaaaggacatttccaaactaaaaaagcagaagttacaagacataaaagagtgaccctctgaggggcaccgcccacgaccattaggtctccctgggcttatttccggcctcggcgcatgaacaaatgggcgcgtgggcagctgcccaggctgcaggctgtgggtgcatttttaactgtgggcagagatttccctgcagttgatgtcaggagccctgggaaatagagttagagaaattgatttcctgggcccctggtgagcagagcccctggccagaagcagcggctctttctgtttgatccagggtttcatacaratgctcatgktctctacaggcacttgatatgaaaaggttggaagcactttttctcttccttaaaatggggacaataatgcaacttatggggtcctcatgagggtcagctgcgttaccatgagtagagcacttagcaaagagcctggtgtgtaaagaatcagtgctggtccttgttatttctactgctgtcattgtaacctaacaccatcgtctcctgactctaggagggcccccatccttgcagtctatattgacatcatctagtttaaagtgtaatctgtactctacaactcacttactttttgtcaaagttagaattctccragataaaagctggacgcacaaaccagcatggagggcatctttgtctcccccttcagaagtctyccctcctgggaccagggccaccaaggcctscccagcgactctagagtcccagatctctgctccaaggggctgtcttccttagtattatctcctctggcattgccccaaacgctgggtgaggccttcatccacaggccagggcccttgatacacacaagcccctgccaagatgcaccccgacctgccacccagcccatgcccctgtaccagccctctgtcccttcttcatcccactgtctccacctacggcagaccctttattgatcttaacccaggtctactgtgttgctgtcgttcccacagactcattttcagaatctgttctgccttttcctttgtctgcaactgaagattgtccctttggtctggtcctcattcycgtacccctatctgtttcttatttaggggagttagragctttacatcatatcttacagatttctgtaaaatcaggaacaaaagggctgaggatgagcatggagactcttyttgcagcatagagtcgcagggagccggggggtagcgggccatagggaaatcacaagcattgccaggttccctgcagacctctgtggcttgggcatcatttgcagtrggactcagcattacacggtgcacrtctcagcagcccgtgggaccgtggggctggacggccctcctcctcagcaccaccttcttgtcaaacacagctgtrcttggggagggkgggcagagcacaaagccaaggggacattggagggcagtggacagccaggcttgccctcaagggagcccagggcaaggagtgcactgagggtgactcagggaactggctgggaggggctgggaggcagagagggtgataggctcaacctggagagaaggtgagatcacccccaggtctcatgcaagggactgtggacctgagtggaagtgggtgcacagaaagaggaggagggagtatcgggtgaggtctcccagcctgatggggaacagccaccatgcagtccatccctccttgtctgcctgtacccatttatttttggccaggcaattcccccccaccaattctcagtgtaaatccaggacacctccccgaaagtgcccacacccctctagcccatgtgaacaacccctgtggcagacctgtgcacagcgtggcatgtgaccacagcctctcctgcacggtgagcttgccgttccctgtgctgctcccctgacccccaggaggggttgtcagttgttctgggacagccccaaaggccccatggcctccacagtgctgggcacatgacagggatcggcacatagctatgaacagcagcgtctggcatctccagaccttgctggaaatgtggcttttcttcactggaaggccatgtgaaagacagaatgaatgaaaaagaaagagagaaagaaagagaaaaagagagaaggagaggaagagagagagggaaagggaaggaagggaagggaggaagggaggaaggaaggaaagaaggaaggaaggagagaaagagaaagaaagatagaaaaaaagaaaggaagaagagaaagaaagaaagaagaaagaaacaaagaaagaaagaaagaaagaaagaaagaaagaaagaaagaaagaaagaaagaaagaaagagaaagaaagaagggtggcttttccctttgtgaattattcactgtgcttagtagaggaaagtgtgtcttcggctgagccccgatgatgtacaaggtaaacagaacagtccctgaaagcaaacattccagggtgcttggcccttagtgctccaggaaaaccacctggtggtagggctgtggggtgggggaggggagggggagggggaggggtctgcgtgcctccctcggggcttcaggcagcagtctaggttcacttcaggtttgtcaagacccctgcaattgagacacctctgatcgtcctatcacaggastgtagcttcaggtaaccccttcctcatggcctcccaagcaacatttcacaggaacaaatgtacatccaggatcgacacgcacatgcaggacactcacacgtagacaatgctcccaagtgcacatgcaaccagcatacatgtggagcatgcacaagcacacacgtgtaccacacctgggcacayacaacaaggcaagtcacaggcaccttgcacatgtgggcatgtgggccgtcagcatacacaccactcccaggcatctaacccaggcccaccgcctagctgccccttccacacatgcgtccgcagaaccccctgtgactggcacgtgtgcacaccaattmccagaarcactgacccacagaggagtcggtcacacatccagacacctccccaatttatacccgatggctaatttgtgtttacttggagagtttctgagttttttccttttgtatttttctcctcattgggtgcgatytggtttaaaacaaaaacaaaaacagacctctcctgaacaaaacaaccaattgcaagataggagctgggaggcggtggcagctgcaggcacagttggtacggttggcggggccaggcctgcagaaggctgggggaggggaggggcagggaggatgggaaggaggcgggcatccgggaacagccctgccccaggagctagcacagcctgctgggcagggwtctgtggcttttggagtacattttatgtccacttgaggagtgagtagcattggcagtgggggcattgcttgccakggctatcccctggcaggggctgggcaatcaagacagggagggcttgggggactcctgggtttcccttcgggcaggcacattctgcarcaagcccagaatgtctaagctggtgacagatgaggatgcagccgtgagaagttaaatggcccacsctgaaccctactgctgagcsgggcaggctattcctgggactctattgaggcccactgacatggtcctggtttgcattgtccttctgggctcagctcagagccacctgcaaactcctgcgctagccaaggtggaggaggaagaagagcagtgygcttcctacagatgagaggggtccgcacaggcaagccaagccaggaccccagaactgagcagctgccccccaccttcactccctttccagccaccacggagatcagagtcatttaatgaaatggcgccaaagctacctggagctgggggtgggaatgcaaagacgtgtgagacctggcagaggacaggccagcatttgggaggtccttacttctgccgggcctggggttttggcgcatctaaaaacaccccgtgttcttcagmaattctcctggccaagctttcttgagtattttagacactaatgccacacatagctctccctgggcaggcgcccctggtgtctgtcactcctccaggttgtcacatcctggggaatgcagagagagcaccagcatttgaagcttctgctcttggtcctgataatccccttgacttcaaagaaatctctgtcctgcctttgattctttgggacacaagatgagaggagaagcagggtgctgagaagcctgaggaagacaattcaaagcagaggtctctcggggaaggcggcgcagcttgagctccccacrtggcgtccgcccagacactgctggaaccttccacctccagcccaggcccctcctcagtcctggtgcctggaaragtgggaagaggtgggaaaaatccttcactcctctgcaggccccggcccagttaactcaccacccctgcagggtgagccagaacgkgcctcgctgccacaggwttggctgttacctctcccgrgaccggcccggcttyctccctccctccctccctccctccctttgtttaggtctgtgctcctctgcttcccccagagacgcctcccctgctgactgctgtagctasccttgccccatcccaccccttccctctccatcctcgctcttttctctcctggtttatggtttgtctcttcctcaaatgcaatttgcaaaactctcctgaacgaaacaacagcttctgggaggtggtggcagctgcaggcacagtgggcgccgtgggtgaggccagggctgaggcaggctgggggaggggcggggcaggaggctgggaaggggcggggcttccgagagcaccgccctccgcgtccagggcagctccaccagggcaggggctttccctctctctttgttgtcgtccaatgtcaggaatggagcccagcaactcaaagagtggaagaatatatgcatatcataagattgctttctacacttttttgttcatgttttataaatacccctccatattgtatatgtatatattaatatgtattaatgattacattaatacacatagtgtatgtgcttatgtgtaatatagaataatatatatatataatgcacttcggtgaaacaatatgagagatgtgtgcatatctctctttatatggtatagatacatgaaattttacctaagygcatctctgtaaaaagaaacactgagcagggtggcatgtgtctgtaacctcaataccttgggaatccaaggcgggaggatcacttgaggccaggagtttgagaccagcctgggcaacatagcgagacccccatctccmcaaaaaaaaaaaaaaaaattaaaaagtggctgggcgtggtgactcacgtctgtagtcccagttacttgggaggctgaggtggraggattgcttgagcccagaaggtcaaggctgtagtgagctatgatcatgtcactgcactccagcctgggtgacacagcaagattctgtctctaaacctatatatatttggaatccactttgtgggggaaggattatataaagaaagaaatggagaagmtgggtgggtagggagtatgtttagtccaaggccccagcctgtggtacatgcattactcagctccttgaagcccacagaggtcacagagctcacagctgggatagccctggactcctagcccagtgcctgagtgagcacaggaatcctcagtgtgtggctgatgtccarctttgtggccgggtgtggcctgtgtttctggccagagattggtgctgagtgcagctcaggaggcaggacctctccccggcggaggagatttaccaaagatgagcccagccttatccagagcatagagaggtggcagccttttacatccacgtggccctcctcagggaaaagaatcaagcacagggaaagccctctgccccaagaaagcagagagaccctgagcctaccctttcatagtggcttgcagcatggcaggcctcagcctaataacactctcattcctccaggaaatcgtgaaaaacccagaattcattcttggaggggccaccaggactgatatctgccagggagagctgggtgagtgtaagtggatggagcatggcraragggaggttgagtcactgggacaggcaagcaactgcagcatggggtccctgaggacccaagaggcayggggctgggggaacaacactgcttyggcctctgcttcctcactccctctgaatggagtccagtggcctcaagcccctgcacctcygttcctctagagtcagacatgcctgtgatgtggggctcacagccccggagtttacagaggaaagtgacacccagcagcgttggtcrggctctcctacaccaccacagtagctaacacctgcacacatgaactcagtcacctgcgaggtactctccccagcacacattgcctcattccatcttcacaacccaccctcctaacgtcacagatgaggaaatggaggctgaggaaggctaagtaacttgtccaaggtcacagaggtggtagacaggcaatcaggatttgaacccagacactccagcagcagagcccttactgctaaccattatacacaccctggggagccgctccccagcaatccagtctccctcctgcaatgaacctgagtgcacctcaagtcactcaaattgggtcctgcattttaggacttaatccaactgggctgggtttacctttgttctatctatgaaagacagagaragtgagagagcgagagactttcttttaaaaaataccagtgaaatcagcctagagaacaaaccactgcaagcttgtgtggaccctgacttatttctagctgaggttgtcactgtggtctattggttaagaaaggccatgctggaacctccatgctgagcaactgagctatcctaaacacaagatccaaagtcacaaacctagactgatgttagttaattagctagacagagagacaattgagagagagagagagagagagaagcaaatggatagatagatagaaacatagataataagtaatagatgataggtagaaaacggatgcataattagatagataaataggttgataggttgattgattgactgatagaccatacaaaataaatatataataatagatagatggtagtaaataatgataggaaggtaggtgggtaaatacatggatggatgggtatagatagatgatggatgatagacggaattacagttgaccctttaacaacatgagtttgaacagtgcaggaccacttctaagtggattttttttcaaccaaacacagacagaaaataccgtgttccaggctgagcgtgatggctcacacttgtaatcccagcactttgggaggccgaggcaggagaatcgcttgagccgaggagttcaagaccagtctgggcaacatagtgagggctcgcctctactaaaaattaaaattgaaaaattagccaggcttggtggtgcatgaccatagttccagctacttggtaggctgagatgggaggattgcttgagcctgggaagttgaggctgcagtgagctgagatcatgccactgcactccagcctggacaacagagtaagacactgtctcaaacaaacaaaaaggaaaaaaaggaaggaaagaaggaagggagagagggaggaaggragggagggaggatggaaggaaggaaggaaggaaggaaggaaggaaggaaggaaggaaggaaggaaggaarggagaaaatatactattccaggatttgaaacccgcatatacagagggctgacttggtataggcagattccacagggcttactgtgggacttgagtatgcacagattttggtatacacaggggtcctggaaccaatcccccatgtatgccatattctagatacaatgtagacttttcaaaaggtttacattcaggtggtccttctccaggagatcctccctgccgctgcccacctstccccctcttcctctgcctcccttcccctcgaccccgtagtcctccattgctatccaataggaaatcattctactggctcctttgtttttcaaagttttggtttgtcacattggcataaacatatatttggagttacaaccttatattttaccttagtggatggttgattctaaagattattttgtaacacttttactacaccaaagtactgtacatggcatatatatgttataaagaataacaagaaaatgaacagccgtgatctgttgccacccacaataagaactagaacatctggtcatgtagagtgctcacacctgtaatcrcagcgctttgggagggggaggtgggaagatctcttgagcccaggagttttagactagcctgggcaacatagcaagaccacatctctatcaaaaaaaaaaaaaaaactagaacacacttggaacagcatcaaggcatgctgttatctgcagggggtgggggtaggggtggagctgggtgagtgtgaggggatggagcatggcgagagggagrttggattgctggatcaagagygactgcagtatggggtcccwgagaacccaagaggcacagygttccccctgcagtgagccgagatggtgccacttcactccagcctgctcctcccatagtgccctctgctctgcaccacccagatagccgagcaacacgctgacccacagagggcacttcttccaggcacagctgggtggccagccccatccatctgcccaggcccaagagagagaaaagcaatcttgttttggcttctcaatctccccgccaaaagctcagagcatttctggctgaaaacacgtgaggtgttgagttctcaggccggaaaacactcattttcctcaactgggcaaagttgaaacttggaggagagctgggaaaggtcagcccacagcagaggtcactctattagactcctgttggcctggccgccctgaagctgaaagcagacaccaagtctctccttatctttgcatcttctgcgtggcacaaggtctgccaccctagaggcacttggtaaagtttgctgaacaaacgatcctgcaggttccagccatgtcacttcctagtagcatctcccaaagctgacctgaggctcccaaagaccagcagatgcattagaaaccaatccttctgtgctccagctaaggctgggggtggcttgtactctgctggtgacacctctcagaaagccagaaccagggcgattcggaattagctttcccgatgttcrgccctggcgagtctctcttgcctgtgtcaaacagccagaaarggccatattacaatgtcccaagcccagtgacatacggtgctttccagaaatgtgaactcagaaactgccaagctgagtgtgatgggctyttakgttctgatgacgttgatgttgtctactgaaaacaagtgaatctggataaaggtgattcggataaatggatcctcccagatatctgcttacacaggcggcatctgagacactgtgaggcacacaccagacacagcccacactcagtgtgggcaaaggaatgcctccaggagtctggaacagcacagatagcacagataaaatcatgtttgatgtttgacttcactttttagttttcctccagatgtgtgttaacatgaagacacagctgggaagttcagtaggtcagtcaataaatcttgaaaatgcaagataatttaaagcaaatggagccaccacggagataccattatctgtaattaagctgwgtctrggttggggctgcagggagatttctaaccaccctcccaagtactgccgaaccacttgggtggcagctatgaaatgtctgctcgcccagcccrtgctgacactgatgtatgcagwcttggwcctctggaaagggagttgctggaattyacagagctgatgcatcaggcagccatatgtctgaaacccaagtaagcatgtcctataacagtgccaagaaggcaacagctgtttatgatagacgggcagagaagagcaggcaagggaggcagaaggggaggagagagttatttgttggtgtcctgtctgtttttaaacaggtagaaaagatgtggccacatctgaaactccccacatccccttctgacacagagttttcctatttgctgtgaaatagcaatgaaaattgtgatttatggcttccattttgcaggagactgctggctattagccgycatcgcctcccttacgcttaatcaaaaagcactggccagagtcatcccccaggaccaaagmtttggccctggttatgccgggatattccatttccaggtaagagggagccctgrgccagtgggtttacctctctggggcccrgcatgagggcaggtgcatttccacactgcctggtaaccctagaaaaaaatgtcatcagatctgtgtgacatatggtcctaaaccatgctaaagccacattttatcatggaataacagctaaatgcctcagaagaacattaacggcattgcacggtgaatccttatggagcatacatttaaaactataagtgatgttttggcmaatctggaggtccatctgttaagggttttattatttggaatttcttgtgctttaagcacaaattgactaaaccaattatacctccaggaaactggttgatttctcataaacagagaggttctctttatggaagaattgtaaatttggagatcttgagggattttaaaaaataaaaactgagaaaaatacagacaacatctgctggagtcccgtgtgacccgcagaccctcagccgaggtgcacatcaggagaggcttgcccccaggagatggtttcctgctgcttcacctcactttctatccctccagtctctcctccacccctgtccttatatagggttcgaccagatactgaaacttgccccttgttcttacttaggtgggtgacctcagacaattttcttagtgacattaaacctttctacactcgtctgaaaaaaggagagactgacagttccctgcaggcttccygtagagctaaatggcatcacacacaggagcyggcacagagccaggcaccgagtaggcattccttgaccttccaccccagacagtgtcaccttctcctgactcacaggccaccactcagggccagcccgtttcttctgtccctgarryctgcaatctgataagcagaggtactctcaagccctgtcaccaatagcacagaagtgtttcaaaggcaaagagagtgagcaggtcacatgtagctcagggagcatgcaattcccaggggtcaggcctcctgcgccggctggggacagagccactttgggtcccagggaaactctacccctgctctctcacagacctgccaccacctggctgtctcccttcccatcctgtgacttctgctgagaccacagtcttggtttgatggcgcccccaggagccggtctttccccagtcctcttaaacacaccagggtggcagtgttgggggtggttaagctcagaaaatccagcagaactactgcctctaaaccagaaccagaaccagcagaactactgcctctaaaccagaaccagaaccaccacctcttgggctcccaaaaggaacagtgttcttgtcccttgaatgtcacagctgggaggagccttggcaatcccctgacccagtcctctcattaactcccgaggacactgagtcccagggagtggaagtggttgatccagggtcacaaaacaataagtagccaagccagacctagaactcaggagttctggatccagcatccttttgtgctgccagggatcatgtgggggtggggagtgaccctgttgatgcctgtcagtcccgcaataacaatactccgcccgctcccctccttggccttctaggaagcagagctttggaaataaatccacctccttcacactcctcttccactcctcagccacagtgcaggtgtgcgtgctaggaagttagcagagctctctgggctggcagataatctctcctgactcacaggccccctgagccagcccctctgcaaggaaagccagccctgaggctcctccccactgctcccctgctcaggaaccccaaggcccaggcccgaactttaaacacctaacccaactgtgcctcagtcccacctgaagctgtggatagccccaaaagcgggaagccctggaggggaggtccagcwgsagcaggtgacaagaatcttccttaaaacacacacacacacacagacaccctcagccacatcgtggccaactcttctgattgggattgaatcactgatgcagcaagatgctcaggatgacacagcaaagctgtaaataaatggctcccaaaaccactgtgcctaccctcctctttcaacccttttcttyttactcttagaggttaccttaggatcgctctcaggccaactgaaccagaaggaacgggtaggaggtgggtcactgcaggatacacagagaaactaccatggtccttgactcgttccaacctcccttcctgttcccagcagaccacacacaagctcatacacatgcatacatgtgctcaaacacacacgtgtgtagaagcacttgcaaacacatgcrtgcacacatacatgcacacacrtgcacacatgtgagcaaacacaygctttcacacatgcaatgtataaataaaccacaaacagtgcacatacctgtcatgcctgcctgtatgcacatgtatacacatgtgtgcgcacatgcattcacacacacccacactccactcatgtctcctcactggcacgcagggattactgagtccacctgcctcctrtgtgaatggccaacaaatcagtcttaggggctccacttatgggcgaggagggagcaaggttaaggaaaattggagctagaccctgaaactggatgggagagaataacagagaactgggctacaaaacagcaaacccaaaccccacgttaccattctccctcccccacaaaaacaactttcttgtgaagaagaaaaactaattcagagcaccgtagagtgtctacttgtgagtcctgtcctgccccctgcatcgcctgcggctttgatgggttgaccctgagtctttcagctgatgtcaatggttagtgctgggtggaatactcagcttgtaacttggwggacaaagcccaggtgccctaccttggaacccgtgtgtgattttcaaagctgtctatgggtagcttggtcagaggggaaaaaagcaacaggatcaacatttacaaacagggcctggagctcccatgtagctgactcrcatcatttctgtctttttcctgggcaacagttctggcagcacagtgagtggctggacgtggtgatcgatgaccgcctgcccaccttcagggaccgcttggttttcctccactctgccgaccacaaygagttctggagcgccttgctggaaaaagcctacgccaagtgagtgacagcttccccagctcargcagcctcccgacaggagtctctayactagtctttgtagtgagcatctaarggctgggaaaaaatcagggctctgggtttgcaggtgaggctcggcaggacccaaccctctcagggctcaagcggggttggaggtggttttcctgtcgtagcctagatgtgcccatctttgggagcagtsgctacattcatgaccctttttctccctgggccatgaatctggcctttggaagagctgggaaggcaagcggaggggaattctggctgtgccgacagcacttagtgcttcacacttccctcggacactggcatggctcaaacatctgggctattacgcacgtkgatatagagacatcaattgtccgtcctacgggatgcttcttttttatttttaaaaartcgtatatgacatatcgataaataatcgtatatgataaaatgtatatgacataaattttaccatttttaagtgtkcagttgagtagcattaagtacatccatgttgttgtgcagctatcaccacgatctatctccagcactttttcatcttgcaaaactgaaattctgtccctattaacaaataacttcctattcctcccttcccccagcccctggcaacaccactctactttctgtttttatgatttatctagtctaggaacctcatataagtggaaccaagaaattcatttttaatcaccagccaaatggcctcagtttcctcaggctctcaatttccagcccactagctcgttagtgaaaggccacaacagcctgaatttgatccacagatgatggcagagctcctgggagccactttcaggttcagcctggatcttcaagccatgagaatactatccccagagacagaagcaaggatggtcttgcttctacctccaagtgggacataaaagtggcaaaatagaggggagkcatactgtggttaaattaatcctgaaatcagcaggacagaattaaagccatcaaataagaaccaaagatgcccacgcttgccctctgtcccacccaggtctgtgcaaacaccatcagtgccaccagacaggcttaaggggacaaagggcactgtttccaagtccagtgggtgggacccaagcccacctctgccccttggtgagtgccccccacatcaggatgcaagcaaggcaacagmaactgtgtgccatctagtttctaaacataaaaaagatttattggggtcayttaaaaaggccaaaaatggttggcagaacagctcaccaaaaaaaaactgtatagatggtgttatggttagttttatgtgtcaacttgattgggccaagggatgcccagatagctggtgaagcattatttctgggtgtgtctgtgagagtgtttctggagaaaatagcttttgaatcagtagactgagtaaagaggattgctgccaccaatgtggacgagcattattcagtttgctaaagatccaaataaaagaaaaygacaaaggaagggtgaattccctttccctacttgaactgggacatccatattcccctgctcttggacattggagctcctcgttctcaaacctttggactcaaacttggacttacatcatcaaccccccaattctcaggcctttggactcaaactgaatgataccaccarctttcctggttctccagtttgcaaatggcagattgtgagatttcttggcgtccgtaactatgagagccaatttcaaacgtatgaaataacctcattgawggggttggagagaaaggtgctgacctaagtaactttggaaatcagtggagtctgtaagattaaaggcaaaagaaactgtacgtgagtgctatgctctagttgctaaaattgtttcttgwaggagtacaaatgaaaaattgatctaattatacatgtatattgagctgaacaatcgagtgaacggatggtggatggcgggagccgagtttctcactgttggattgagaggttacagataggcaaggggaggaggccagaatgatccatgcagattagagttggagattccagaatgaacttagatttagcttaacagagatggttatgtagagatacatggatctgtacatgggttatcatacacatatatattgatctatacttgggttatcatacacatatgtatttccttgctttgtcagtgagaggaactagaagcaatgacaatcctgtrgcaacaagcacacctatgtctcaagtcttggtttctaagatcattcttcaatcaaaggaastggggcttcttggagataaggctgattctaggactggggcatacacacatacatacatatatatacacatacatatatacatacatacataaaatgaacctagatcatcttatagtgccagaaaatgagaacacatgcaagacacacacacacacacacacacacacacacacacacacacacacacaaatgaggttatgccaaaaggrcacaagagcatactgaaggagctccaaacagccaaagctagaagaattcaaccaacgaaatagacaaagcastactggattatgaacccaagtagaagctgggtgcagtgactcacacctgtaatcccagcactttgggaggccgaagtaggtggatyacctgaggtcaggagttcgagaccagcctggccaacatgatgaaactcagtctctactaaaaatacacaaattagccaggcatggtggtgcatgcttgtaatcccaactactcrggaggctaaggcagcagaaccacttgaacccaggaggtrgaggttgcagtaagccgagatcatgccactgcactccagcctgggcaacagagcaagactccatctcaaaaacaaaaacaaaacaaaacaaaaaaacacaaaataaacccaagtagaaaataaatatcaatgggttcatactaatttgaataaatgattgtataaataaatgtggaagaaggaacatatatcctgtgtagaataattccaaataaattatgtttatattccatccttgaggaggtggagtataactccctgattttttcatgcggccttcacataatgattccttccaaagagttcagcatggaaaggggagagaaggagcaactttccagtggagacacctgactaacactaccttagcyaggtgatcaaggccagcatcagctgtggtaaggcatgtggayggcaggtactcttgatatsatgagatgagagggsagctttacctctccggtcttccttccactaaccaatagccccactcttttttttattattatttacttttttttggagacagggtcttgctctctcacccagactagagtgcagtggcaccgtaatagctcactgcagcctgcaactcctgggctcaagtgattctcctgcctcagcctcccgaaatgctgggattacaggcaccaaccaccacacccagctatttttttaatttttaaaaaatgtttcattttttatttttatggatgcataatagtgcataatagtatacatattgatggggcacatttgatattctgattacaagcgcacaatgtgcgatgatcaaatcagggtaattgagatacttatcacctcaagcatttatcatttctttaatagccctagtcttaccaggagaaaaaacattagacaaattctaatcctgcagtatgcctgcccaggactcctcaaaaccgtcaaggtcatcaaaaacaaggacagtcttataaactgtcacagccacaaaaagcctaaggatatgtgaggactcagtgcagtgtggggtcctgggtgggattctggaacagaaaaaggrcattaggtaaaaactaaagaagcccaaataagctattgtattaagtctgttttcacactgctgataaaaacataccctagactgggcaatttacaaaagaaagacattcaattggactcacagttccacgtggctgggaaggattcacaataatggcagaagacaaggaggagcaagtcacatcttacatggatggtggcaggcaaagagggcttgggcagggaaattcccatttttaaaaccatcagatctgatgagactcattcactatcacaagaacagtgcaggaaagacccgcctccataattcagtcacctcccaccagattctaaaattctaaattgaaaagcttatttaaaaatcaagcagagcacatatatgtaaaatgcatatgaataaaagagatgactatgacaaaaatggttaggagtatgtgagaccagagaagaagggaaagggcctctctctatccacatagccaggccccgttccatgggaggttagagagtgagacacacgatttgaacctcacagcagtcctagaagggagagcacaactctctcccccattttgcatataagaaaatgaaggcactagcgacttggtcattcagatggtaagtygtagaaccaggatttgaacctgcggccactcaggcaccagagctgctgctctataccaccacaccacactgcctcccttgcaggaaggtcaggatctttggcttcctcgaagctccaaacaaaccctgataacttgcttcccgtcttccttccacaccacccagccagggcaagccctgggagatgcttcaggcttagttagaaaagctctgaaagcagggtgcccyrgtggcctccctaggtccctgactctctcctctctctcttgccacccttgcaggctaaatgggagctatgaagctctgaagggaggcagcgccatcgaggccatggaagacttcacygggggtgtggcagagaccttccaaactaaagaggcccccgagaacttctatgagattctagagaaggctttgaagagaggctccctgctgggctgcttcaytgatgtaagttgctcatgggctcccattccaggcactatgctgrggctgcatagtgcattccaggcactatgctggggctgtaccaggtaccccagccacacccaaggaggggcataactcttgggggcagtgtttattcctgctaattaaaacacaagttttggggggaggtgggagggatagcattaggagatatacctagtgctaaatgactagttaatgggtgcagcacaccaacatggcacaggtatacatatgtaacaaacctgcacgttgtgcacatgtaccctaaaacttaaagwataataaataaataaataaataaataaataaataaataaataaataaaaaataaaataaaataaaataaaaataaataaataaaacacaagttttaaccaagcatggtggtgtgtgtctggagtctgaggyaggaggatcccttgagcccaggagtttgaggccgcagtgaactatgatcgtgtcactgctctccaggctgggtgacagatcaagaccctgtctctaataaataaataacaaataaaacacaagtttttatttaatagtcgtcaaataacaaaggtaagatgtacttgctgtatcagatggaacaatcttgaggcccatacaggcgcatttttacctccctcccacccgtttctcagctgcctctgttctccagctccaycctgggactgggatcacctggcctgtatccttcccagctctctatctgctcgtacaaacaggcacacacttccacacacaaacatcaaggtcagttggtttgattttactgaaaygggatcttyctatctagttttctgaaatttgttttttttttttcatttcatgtactatgaaaaaaatagcagatagaagtctaatgataytttttaaaattttctctatgcatacaaacacacacacttataattttatctcatctttttaaaactttttgttgttttttatggactgctatgacactatgtattttttttaatcaattctagttttctgtttcctcttagattagccttggggtctgttttytgctaatgaattagccagttcctctgcactttcaggtttgtgacgcagagctgtgtgtcctgttgttatattcttcttttcgtctctgggatgtatgtgattgtgtcttctctctcacactatactacatgaaggtgacaagttgttctgtttggggacaaaatagtgaactgttctttggagtccacactggaagcgagcgcctccccatcctgggaagagactggaacttgcttcatgtcactgctaaacatcctaggggagccccgtgcatagcccacgcacatggcctgcacctggggcagcagaaggggctggaggttgtgacygggccaggcatgtagctgggtctgatccagcaggggaggcttgacttagacggtgggtgtgackctgctyttyccatgttttagaccagaagtrctgcagaatctgaggcccggacgccgtttggtcttattaagggtcatgcctacagtgtaacgggaattgaccaggtaggcgacttgaactccaactgcaggctatggggagacatgtgacaatgctaatcccttaggcatttattcagtgcattgcagtttaaatgtctgcctttcaggcatttcagagattatgtcacctaaagaggcaggctggaattcaaaacggcaagccaggaaagagagaaaccatgtgattccaccgcagcacaaaactcgtttagcagctgtaagcgcctggtctttgtttatttttaatttcctttctttcccaattctccttcagtcctgtgttagtcaggattcttcagagaaatagaatcactagggaaccaaatatatatacatacaattaaacacacacacacctatctatctatctatctatctatctatctatctatctatctatctatctatctatctatctacatcayacagttgacccttgagcaacacaggcttgaacttatatggggattttcttccatctctaccacccctgagacagcaagaccaactcctcctcctccttctcagcctactcaacrtgaagataataaggatgaagacctttacaatkacccagttccacttaataaatagtaaatgtatttcctcttccctatgattttcttgataacatttcttttctctggcttatttattgtaagaatacagtatataatataaataattataaaacatgttaattggttctttaygttatcgataagacttctggtcaatggtaggctattcggagttcagctttagggaatacaagattttttgacaatgcaggagggttggcaccccaacccctgacattgttccaggatcacctgtaatacgatttattgtaaggcattggctcatgcaattgtgaagagtaagaagtcccacgatctgctctctgcaaactggaggcccaagaaagccagtggtgtagttctggtctgagtctgaaaggaaggcctagccaccaggaacaccaatggtaaaagtcccagtctgagggcaggagagacggatgtcccagctcaggcacccaggaagagagagtgaattcccccttcctctgcctttttgttcwggtcaggtcttcacagatgagatgaggcccacctacactggggagggcaatctgttttactcaatcaacttaaatttcatgtcacccagaagcacccttgcagacacaaccagaataaccttaaagcaaatatctgggcaccccatggcccagtcaagttgacacataaaattaatcaccacgagtcccattcttgtagctgtagcccagggtggaactgatcctgggggacacccagactccacacagcaccaccctgacttcaagggagctgttggttaggaggagagatccttgaggggcacaaggggaagagwaagaaagaattgaatgaaagaggaggacaagaagccaaaggtatcactctgccagactcaagctcagcaaagcccagcagcctgccttgcccactccatgcctccctggaccagtctcaagcccagtacttagaaggtgcagatgcacctggtcttctgtagccacccaccttttgagtgacatcctctgaatgcgtggggagtaaagaacactgaagggagacyctgcccttcctcctcactggagccaaggtgtgagacgccrttggactctttgggattctttagaatgttagctatttgtgttggctcctttgtcctccttcaccatccatagatgacttgcagattgctcactcaagcrggcatgtgatgtttctaggttagatcttctacgtattccacgtaacaacagaaacctctcatcatcttggtttgcttgattttgcttcctctcccccctacaaggaactcacctgccctgaacctttcaaattaaatgagcccctttaatggtgagccacaagccacatcttggactcygaagagttgatgttacttgaatttttacacatccaaaatataatttatgccaaatgcatgaggataaaacattctgactgctacagtttctggttagtyrataactagaagtcttttactttcacyctctctcctcyaaaacccttctcaaatgcattggcccttgtccctgctcccaggcagagcctgagggcacacaggctcaagggtgattgaggtgaacagcaggaatcctcacagacacctgaaataaggagaatattgggtctagaagacrtaaaagctgtttttgtttattgttgtgtttaaatccccaacatgtgcttattttcttatcattcatctgtgcatgggatgctaggatgaagaaagttcagtaatagttccatgagcacctttgaggactactctttaccattcaytctgctagatgctgaagatgcctaagacttggctcctgcctctagggagatccaagtctagagagaaacccatttttagattcatatggactaatttcttgttaattgcaattctactttacttcccagatgtggcataagcattttggtgcttaatataatatcattggcaatagtagcaattattcaataggaattagaaggttccaagggctggttaagaactggcgaacttctacataccttcagcagcattttaggcaagagactttcaacagaaccagttctggatggagctggtccacctggagctcatagatgaatgtggccaaacctccaccatatttatcatttcacacttccctcatgcttttcccttctaggtaagcttccgaggccagagaatcgagctcatccgaatccggaacccttggggccaggttgagtggaacgggtcgtggagcgacaggtcagtcaccctatcctgcctctctggctggttcccggggcgtgtggggccagagctggcttgtgcagacatgtgaaggagtggcctgtctactatcctcccgggctctgactcaggatcctgtcccgattctgaggtgccccttcttcctcccctttcagccctcaggcccaccttgcatcmaggttgattctcaagaaagacttttacaacagcactctaactttcacgaattgtatttatgtcaatacataaatgtgttacctcccatggtgatgtttataacccagtgatatggtgaaaagctttatctgtagttgtgagtaactccagtaagcagtgtgcatatgcataartgcgtgtgtgtttgtgtgtgtgtgtgtatttggagtgtcggaatccctgaaatattacctagcatgtaactataggattctctctgatggtcactgaccatggcagaggcccaatagcccagcagagaaatagaagtgaggctgagcatggtggctcatgcctataattccaacacgtcagcaagccgaggtgggaggatcacttgagtatgagagattgaggctgcagggagctatgattgcaccactgcattccagcctgggcaacagagcatgttgaccccatctctttttttttttttttttaaaggaaaaaaaatagaggacatggaattggaattttatctattacagagctgttaaccagagttttggcccccagttatcaagaaaggtctgccttttctgtgtgtgtccccacagctcctccagctctggtcccttgggaagtggaccaggtgactaagaaccagggatgtttgtgtgggtgcgtggcagggcctgcctgargctgttgctcgtccgctgcttgttgggctcctgaagccctttcctgccacatccatggcccctgagcttctggggaaatctgaagctagtctagaacttggttaaaactgagccagtgtttgtcttcagtccagacacagctaccaggtcrccagacatggtgcagccgctgctgtattagccagaccccagcgtgagggcagggcacacaggcctgtgctttccaggctgtcatkgtccccatggaggctctcgtcccaccatcctctgctctggccttggctgccgccttctgagaaccaagaagcattggcagagatgagctgagatgggttgaggaggaaagagattggcctccctctcctggcagaaatggaaagcacagagaactactgaaaccaaaattagtgagactgcgtcacgttgtaagatgtgcagtgcccctcaactttgagatcgtagcctataaagggaaaatgggccattgtctcccattttctgggactcacagaggtagaaatcaagaaagkgactgagagccaaggctggaataaaatttgtcttccactcatgcagcctccatgggtgatgggaggggcaggcgccrtcccgaytccctgacttygctgtgctgctggtgacatgtgagtagggttgaaggcaccgcatggccagcctgtcaggccaattatctgggtgtgagccacttaggataatggctccaaaagaaaataatggctgccagttccactcttctgaccctggcccgagcacctggagacaggtcccggctgatcctccccttggatcacctgagcactcccctgaggttgagttgagatcacaggatgagagggagctgccacgttggctgtagcaccgcaacagtggtgacctactttgaactatttggaggcggctgtgggagtcacagaaaatgcaatgaacttggagtcacaaatcctgagtttggagagtgacaggcagccattcctacccctactcttccctgagagtgtttccatgggcctacctgagccctcttatctgcaggacgggcacacctagctcacagaaccccacctggcttgccagcgaggtcacatacaaaaggtgccgggtacagacaacatcaagcatgggcaggtgtaaggcattatcacctttccaagtgtcagcttgtccattaaggaagggccaagtactgctccaggtcacatggcaagttggaggccaagcacgaaagtcagcagacttgtggcttccagccgggctcttctgctaccccacgggcatgcaatgccttgtgactatcccaagataatcttccatgtcggtggttcagatcatcctcaggggtattttatccatcagcaacacttggagatgtactttctgaccagccctcttatttgggggccagtggctcacctgccgctacatccctgggtgcatttttgggacccagtgagtagttactaagcaggtcttatttcctccataaccgcacactgtgggttccacatcaaggccattgttgctcttcatcatgacctctgcctgaacaccaattttgtttactcctagttctccggagtggcgttctgttggtccagctgagcagaarcgtctgtgtcacactgctctggatgatggggaattctggtaccgtgcttgttcctgtgttaactgcagatacgagcaagtcccatggccctggggcgtaaggagcactgtgcttctctctcgctttcctttttctttctttctttytttttttttttttttttttgagacggagttttgttcttattgcccaggctggagtgcagtggtgcgatctcgtctcactgcaacctctgcctcccaggttcaagtgatactcctgcytcagcctcccaagcagctgaragtacaggcatgcgccaccacgcccgactcattttgtatctktagtagagatggggtttcaccgtgttggccaggctagtctcgaacccctgacctcagagaaaccacccaccttggcctcccaaagtgctggaattacaggtatgagcyaccacgcccagccttctctctccatttttggcaaatcaaattcatctgtctcagactcctcatatacacccagattagagggaaatttaatctccctcctgtsttggtgggggctcaccccagctctcggtttgttgaagagtcttcagggggttcctgcaatccaatagaggaagagcctctggtctctagcctgacacacctccttggcactctttgtcatccaggtttacacagtgaatttgaagacaggcagccctactgctcacaggatccattccctccacacccatcttgatgagaggtacctttgaaggcagctgccctgagagcatctaaagatatcgacctacgtaggaagtaaacatttctactctggactttcccttggcctgaatctctttgtttaattgaacatttgtattgggccttcatctctagaatctttttcagtcttatttcttcctgtttgggttctagaagttggcccttctaaccctgtgagaccacaaatttctggtttctggctctattccctttcatgtgctccaaccaatcaagtcttgcctgagctcatctctttcttgtaacagcttttaaaatacaacagcagggcacggtggctcacgcctgtaatcccagcactttgggargccaaggcgggtggatcacgaggtcaggagattgaaaccatcctggctaacacagtgaaaccccacccctgctaaaaatacaaaaaattagccaggggtggtggtgagtgcctatagtcccagctacttgggaggctgaggcaggagaatggcgtgaacccaggaggtggagcttgcagtgagccgagattgcatcactgcactctagcctggacaacagagtgatactccatctcaaaaaaaaaaaaaaaaaatactacaacccaaaaccatgactattccagcctttttcattcttttcccatagaacacagcctcagtagtgatttgttctgccttctgtatttttatagttgtcttagtctatttgggtggctataaaaaaataccatagactgagtggcttacaaagaacaggaatttatttctcacagttctagataccaggaagtccaagaagatgacacaggcagtacctrtatctgtggagggccctgtttctgatttatagatggatccttctcactctgtcctcacatggtagaaagagggcaaggcagctctctggggcctcttttataatggcactaaccccatccatgagggctccaccctcacaacctagtcacctcccaaaggccccacctcctgacactactacttcgagggttaggattcaacatatgaatttaggggagaccacaaacattcagtccataacaacatgcaacagatttacccaatgttttgccactgcataacatagataaccattttccagctcgaacagttccatgatccctcttgctcaactgctaacatattttagaatttcgttgtggcagttctgtaattcaaggcaccaatgactcaaggtaacactagctgcagtagtgaatagaccccaaatatataaaggctcaaacacagtaaagttttttcctcactcattatgacagtccagggaggatgttcatattctgtgggtggctctgttcatacagtgattcaggaacccaaacgccttctattgtgtggctctgccatcttctarggtcacgtcatcatctgcacatagccagcagaagagaagaataaaataaaacattgaaaaagacactctcactttctaaaaatcttgactcagaagtaaatgcgtcacggctcacattctactcccaaatggaaggartggggtgcagtcttggtcctgtgctgatgactgccagccatctctgcctcgggaaccatgagggtttaggttccccagatttgtggaacacatgcagggtgcttgagagattcccaagctgtcaaattagaaattacagataaactttgaattttgaagtacaggggactttgagttarggggttacaagagaggagcaaaaactgcaggaagaaagctgagttctggaattagtamcatcacagtaattgctgcatatgagcaggaggtagaaaccagagtttgagaggctacctgaggtcaggctagtggaaagaaggtckgrtgcagacggtgggagaagccgggcagaggaaactcggaaattcacagcaggargctccacaaagaagagcgtccatgtgagtgatccattgccctgcccctcttgaaggagcagccccaacaccwgggctgagcctgcccaaggtgatgggtggtgttaaatcatgcactctgtgcgtggagcccttcctcctggaatcctgactctgaagccctgtgtagcctctttccattcttcaccrgctctaggatgtacctcctgcaactctcttctctccccttacgtatgaattccccccttcttctgaatcattccccttagcactccaacactatcatttctcctacctgcaaagaaaaaaaaagcctctcttgacccactcaagtgaccaacccagctctctcctgtcctctacagcaagcccgccrgttcctcttctcccttactctctcgactccactcagctatgagtgtgccccaccaccccactmaccctgatcttgccagggacgccaccgactctcactttgctcgatcagattatcttgatccatcaggagcccttgacgtgctggattgcgggggaccacacgccctggtggtcctcctcctacctgagctccttctcaacatcctgtcctggccccctctcatctccctaacctgttagcactgaggtgtcccaggaccccatccatggtccccctcctggctgtctattcccactctttaggcgtctcgtctggtctcttgactttaaaaactatctttacactaattctcaggtttctatcttcagctcctttccccaggattccagagtcacatattcaatggtctactttaacatctctccttgaatgtataatagacatctcacattcacgtgcccaaacctgacctcctgagcttctctctcaaactgccccaccacagccttccccatctccatccttccagtcactcaaatcaaacatcctgattcctttcattcgctccttccccacatccagtccattagcaaatcctataaaatttacctttggaatgtgtctcaaatctggccactgttcatcacctcccataccatcagcctggaccaagccacccttgtctctcacttggacaccggcactaacttcctagctgcctctctgcttccacttgtgtccccaaartctgttctcaacacagcagccatggagcatgtgactcctctgtttactgccttctaaaagctctccatcttctcagagtcaaagccaaaatccctatacctatttgaygtactatgatctcttgatcttattccttacagacacctcgtgccttcctggtgttctgtgagcacctcaagcacctctctgcctcggggccttgctgtccatctgcctagacccccagagagctgccctgcccaggacctggtagttcaggtctccactcagaatgtgccccatcagtaagggcttctcttacctccctgtttaaaatagcatcccacccctacgctcccatccttcagcccaatttggtttttctctgtagcacttaacatctacaatcaatctatatttttagcctggtttttacctttttaacctttattttacttttaaaaaattttccatctccccacactttgcagtccccccactccttgcggacrggaacaagatgatttaatgaataagtgaatgatttaatgaatgagtgaatggatgatgccctcactcttgccctcctgtgcatcgtgtctctcmgctttgctgcaggatggcatttmaggacttcaaggcccamtttgataaagtggagatctgcaacctcactcccgatgccctgraggaagacgcgatccacaaatgggaggtgacggtccatcagggaagctgggttcgcggctccacggctgggggctgccgcaatttcctgggtaggtaggctgcctgtcactctctctgccactcccaagtgtcccttccaactcaggacaccaaaggataagggccgggtcctcagagaaagcctgaaacatagtaaggtttcaaaagtgactggggaaaaaaggctgcaaagatttagttggataagaattgtttggggaaacctcctttgttttaccacttaggttattttccattacaagtaatggaaagcatgactcatgccagtttagcaatagaaaggatttgttatctcacataattgaagagctcagaggaaaagtagggtgggcttcaggcacagttctatcagggccctggttccatttgcttgtaattcactgttctgccctcttttatgtgttgacttctttctctgtctggctttctttataatcacaggagggctggcagcagtatccagggcttcctgagccctcattcacacgaacagcaagagctcctgggggtatcaaaaaaaagccctcaacttccctctaattggaaattccttgaactaatattgtccagtgaatgctatgcattgattggctttgtccaatcctcggtggcaaaaaggactggcacagaccaatcagaattcatgctggagcagtgctcgaggtcaatcctactcaaacggcccaccatcaagtagatgccagggggacaaccagaagtccactgcactctcctttgaaatactaagtggaaaaaaaactgatagaacaagctttagcagactagacccagaagaatgtccttaagaaactgcataggaaatggttgaagagaaggtggaaatgaaagagaggatattttgcattcccgttggggattatcaaaagtagggtaggaggacttattgaacagggagagaaggtattactttctcatgtttggtaggacatataatgagggcagataggtgtatgtgcgtgtgtgtgtgtgtgtgtgtgtgtgtgtgtgtgtggtctttgtgggttgttttttaaaaggggaaaataatctacctctcccaaatgacagataccttttggaccaatccacaaataaaattgtctctgactgagaaagatgaggggcaggaggagtgtagtttccttgtagccctgatgcagaaagatagaaggaaactcaagagatttggtgccaatgtgctgacaatcggctatgccatttatgaggtaggtgggaaccacactgcatttcagagttctccatctgagttctaaattcgcggctcctcctcggtctcacacccgagactcaaccaagagtccatgaattgtgtccgaaaagccaagaggaacttccctaggaaacccctccctttcttgcccattgcagtgccctgacaaagacgaacacctgaacaaagacttcttcagataccacgcttctcgggccagaagcaagacgttcatcaacctgagagaagtctccgaccggttcaagctgccccctggggagtacatcctgattcccagcacttttgagccccaccaggaagctgatttctgtctgagaatcttttcagagaaaaaagccattacccggtgagtcagaggaacagcttccagaatcccacttcttttagtggtttattcacacagaagtcacctgggaactgctggagccaagactccattcttccctttcccatgtgtacctgagaaacaaggcaggatggtttctttcttttcttttatttattattaatttttttttttgaaatgaagtttcactcttgttgcccaggctggagtgcaatggtgccatctcagctcactgcaacctccacctcccaggttcaagcaattctcctggctcatcctcccgagtagcaaggattacaggcacccaccaccacaccyggctaattttttttgtatttttagtagagacggggtttcaccatgttagccaggctggtctcgaactcctgaccttaggtgatccacccgcctcagcctcccaaagtgctgggattacaggagtgagccaccacgccaggctgcaggacactttcttagcttatctgcaaggcaaggcacatatcccttctagctctgctcctcgctccctcaagcaaaccattgaaaagttgctgttttctactggtcccagagtcatgctcacaagacattcttgggtggagaccttcatttttcagaccctattaccaagaagcttcttggataagagccacatgcagggatgctagacatttctgggcatgatgaagggggtggctattgcaaatttcaagaatgacatgttctttcagctccaatttaaataaatgttggcaaatctgcctctcattttacatacccaatattccaccacattttcctcacagtgtcttagcgaaattactttatatcagttacttctatggaaaatgtttcccattactgcccattcaccattggttgctctgtggcacagggggaaaaatggttcaagacagaggaatccatttcttttcccgatgacaatattctaaagattaaggagaacgctaaaatctgctaattctgtatttaagctagataagtctccaacaaaagatcaatctgcacagagttaacaagagagacagctgtgaatrcatgactcactctagtttcatctttcgtttagtgagagagaattagattggtggcatgcattgaaaagactctcaattatgaagtctagtggggtttcccaagctgattacaaaaggcatggttctttctcttggctaaatagatgcagaaaagtctttaatttttaaacactctaccagagaatttttctccagccttctcccagatactagtacaagatggggatgaatatcctagtatctgttcacacaaaagtaccctgtatgagatccatgcagattgacatctcttatgggtggcaagaacaagagagacccaagttatgscaatgccatgcctcttgttctctatcttattagtggggtgagctcagagtcactgacatgcataaggtgacttgtacatggcaaaaaactccatactcaatcttgctctgaacaagattctttaatctgctatgatattgagtataagaatcagctctgtagcttggtaacaaaaattcacactgagctgtgttygcattggtttagctctcagacagactcctgattaaacaaacagaagttctgaaagggttatgttatggatgcccaggggatgaggaggaaagggaggactacccccaattgatgttaatgtttatttgtattccctttgactttgtatcagtttttctttgagagcccttcaagttttagtctatgagactgtattcttccaaatgtttttagcatcatcaaaagctgaagcctgctcctcctcttaatattactactatccaaatattacaagtccccctaaatatgtgaatagcaaaaaaacatgattgcatcatttttcctctttttccctaacataagcacagagacacccatccctccccaaccccaccagtggaatcaggaatttacatctgtgatgagaggcaggagttagggatgcagcttcaaaaggtgrtctttaggccaggcacggtggctcatgcctgtaatcccagcactttgggaggccgaggcaggaggatcacctgaagtcaggagtttgagaccagcctggccaacacagagaaaccctatctctactaaaaatacaaaattagctgggcatggtggcacgtgcctgtaatcccagctaattgggaggctgaggcaggagaatcacttaaaacccaggaggcagaggttgcagtgagccgagatcatgccattgcactccagcctgtgccacagagtgagactccgtctaaaaaaaawggtggtttttttggttctgattcaactttgtaatcttttaaaatgcaccccctccccagtgcctaccactcaataggctgaatggtctccaacagatatgtatctcctttgaagatgcaaagttcatggagagtgaatgtgtaatgcaactgcactgtttatgcgtctttggaggtgcygctattctacaaaacactttatcagttgcccttgttaaagtacattaaagaaataaggagtgactgctggcytaacttcttttagtttcataaatccagaattcacaagttcttggtgatggctgatttagtttgaatatgtgtccccatcaaatctgaagttgaattgtaatccccaatgttggaggtggagcctggtgggagatgtttgggtcatgggtgtggatccctcatggcttggtgctatcctcgtgatactgagtgaattcttgtgagatgtggttaatagtatgtggcacctgccccacccctgctcctgcttttgccatgtgacatgactcttcccccttctgccatgattgtagtttcctaggtctccctagaagtcaaggagttaagttaacttctagggaatacaccatgcttctttgtaaagccaattgaacctcttttctttgtaaattagtsttaggtatttctttatagcagtacaagaacagcctaatacagaaaattggtacagaagagtggggcattgttataaagataactgaaaatgtggaagtgactttggaagtagataacaggcagaggttggaagagtttgaaggcctcagaagaagacaggaagatgaggaaaagtttataacttcttagaggctggttaaatagttatggcctaactgttgacagtgatatgaacagtgaagttcaggctgccgaggtctcagatggaaaggaggaactcattgggaactgaagcaaaggttatgtgtgttatgccctagcaaagaacttggctgaattgtgtccatgccctagggatctgtggaagtttgaacgtcatagtgatgatttagggtatctggaagaagaaatktctaagcagcaaagcattcaggatgtgacctggctgcttctaacaacctatactcagatatgggagcaaagatatgasttaaagctggaatatatacatttaaaagggaagcagggcataaaaatttggaaaatttgcagcctggctatatagcagagaaagaaaaagctttttcgagagaggaattcaagcaggctatggagcaaccacttgctagagatatttacataactraaaagagccaagtgctataaccaagacaatggggaaaaggcctcaaaggcattttagagacctttgcagcagcacctcctcccatcacaggccgagaggcctaagaggaaaaaaatggcttcatgggccaggcctagggccccactgctctatgcagcctcaggacactgttacctgcatcccagctgctccagctccagtctctgctcaaaggcaccagatacagtttgggctactgcttcagagggtgcaagagtgcaagccataagccttgacagcttccatatggtgttaagcctgcaggcacacagagtgcaagactgaatgaggcttggcagcctccacctagatttcagaggatgtatggaaaagcctgcatgcctaggcaaaagcytgctgcagggacagagccctcacagagaacttctactagggctatgcagatggggaaatgtgaggttcaaggtctcgcacagagtccccactggggtactgcctagtggaactgtgggaaggcggycatcatcctccagacccaagaatggtggatccactggcagcttgcaccttgagcctggaaaagccacagkyactcaacaacccatgacagcagccaaagtcacagggacagagcttcccaaggccttgggatcccaccctttgtaccagtgttccctggatgtaggacatggagtcaaaggagatcactttggagctttaagatttaatgactgccctgctgggtttcaaacttgcatggggcctgtagcccctttcttttggccttttggaatgggaatgtttacccaatgcctatactcccattgtattttggaagtataaaatggaatttgtatatcttggaacttgattttgatttgacaggctcataggtgatgggacttgccttatctcagrtgagactttggactttggaattttgagttaatgctggaatgacttaagactttgggggttattgggaaggcataattatattttgcagtgtgagaaggacatgagatttgagggcccatagcagaatgatagagtttgaatatgtgtccccaccaaatctgatgttgaattgtaatccccagtgttaggggtggggcttgatgggaggtgtttgggtcatgggggcggatctctcatggcttggtgctgtcttcacgatagtgagtttgcacgagatctggttgtttaagggtatttggcaactcccccataccaccctgctcctgctttttccatgtgacttgcctgctcccccttcaccttctgcaataattgtaagtttcctgaggcctccttagaagcagaacggatgccagcactgtgctcctgtaaagcctgtagaaccatgagccaatcaaatctcttttctttataaattacctagtctctgttatttctctatagccatgcaagaatggtctaacacaatggctgtccctcttatttacattctgagcaaggtctgagtgactaagggtgggggtgtcaatgcatggggtctgcaaactctgtgaaatgtaaacagcactgaacaataagggattcaaagggacagaaccttcccaggctctgggctcttcagctctgcagatcccaatgggaagttaatccacaattgaggcagtgtgtttttctgcccctacagggatatggatggaaatgtagacattgaccttcctgaggtgagtcttctgatgttgctatggagtatgggattcaggtgatggttctggaaaccttccttctaatcacagcatcatgtaaaactctgcagttcagggatggttacatgcaatcaagtaagcatctatgattctaacctcctggagaccaagatgtgtgtgttctagtctgtgctcttctagtccacaaggacctggcatgggagtgaggtgggtgcttggtataaagttctgttcsatgtcatcttcctctgtgctactgtcaactgaaataacaaacacagagacactctctaaaagaaaagctatttatttagggataaagcactgcaatgggaaggtgcatgccatagtaaactatgcacctatttggggaggtaaaggaggacaaaggtttttaaagaaaaaatgagaaggattacataattgttttgaaataattatccttggctacaaagatcaataacaaaagtgaagccagtctgatgttggacaggcagttgctaggcagaggtagaagtatttttgtgtatggttgcgagggcctctgtgaaaggttgtgggttttgcagccttttgtgatatttttgttatcaggcaaataagcatgagaaccttctggccttcccgagctctatttgtcagggttttcttaacattagtgacttcattttgactcaataactttcacactaccaactccacctgagagaaggctgccgcttctgaagtgggtagacttttaattgtattttaagaaatctaatcaatgaaaagaaaaccagagaggcagggagatgttttttactgtggactcaggggaacayattacatctcccctatgttatgtggtgtggaaggggtgacatgggggtggctttaccctcgtccaagggctggaggactcgcaagaggccctgagatactatagctggaaatagtctgacacgtccagggacagcagagatctgcttttaggagggaatttgctgttccatgctggggcacagcttattaatggtgctaaaaaaccaaagaaaccaaaaatcacccaaaacatttactgagctctttctatataccaagcccagagcttagtggtagaaacagactcttgccttcaacgattttaccagctatcaaaacagatgatgaagtaagtcattccagtccagggtggtaagaagyaagccagaggaagggcaggaagcatgaaaatccaatggccaggacctaacttaggcacgggtcaaggtcctttggcctcctcgtctgtaaggcagaagggctccacaggtccagctaataaagtccttctagtctcaccttctaaaagagccttcatgagaaaatgttcctcacgctacaggacgcagcttgtgcacacygcctcaggagggtgacatggggctgggcacacaggstcctggcttctttcctgctatttttgtcatgtttcttttttgtggatcattttgtgcaagtttctttggctgttttttagcctccaaagccaactccacctgaccaggagacagaggaggagcagyggtttcgggctctgtttgaacaagtcgctggtgaggtaggacatgccccacttccatctccccaccaggctgagggcctggacctgcttcctagcaaagggttgcagtcgtggggttggtcagcaacgtcatcctgaggcatgatggagcttgttgcaaagtaagaccagcactgatcattcaaggcccaaagaccaccctgtttacaacatttacttacacagtctgcggctgtggatggggccagtgagcccaaagaagcttggaataggcccagacgctttgttttttagttctgttttgctttagacagagtctcactcttttaccctggctggagtgcagtggyataagcctagctcactgcagcctcaaactcatgggctcaagagatcctatcacctcagcttcctgagtagccgggactataggcacatgccatcatgcttagctaattaaaaaaataaataataaagagtcttgctatgttgcccaggctggtctcaaactcctaggctcaagcaatcctctggcctcagcctcccaaagtgctgggattacagtcatgagctaccacgcctggccccaggtgctttctttgggaggctagagcaagccttgaagaggtgactcctttgaactctgcctgaaaatcactgccattagaatactctgtttgctgtagtaaaggggatcatgttcaaggaggtccctattcaattgcaacttcctgtcccccaccctatcctagctctttccactgctcagcttcctttttagggacactggatggagcctcacacagatccaggctcttcctccacctgctggggtcaggggagggaagtctttctagaaactgccccagaggtgctctcttggagccataaatacaatgagctgatgaactaattcatgtcaaggtgctaatgactctattagcttcatgtgtttccccaaactggggttcctgaattatgaaaggggtcacctggaggggtgatatctaaacctaggggctgtctgatggtagtatattaggcactgcaataaacaggcaagrcagggagattaggggaccacaggatcggatggagaaaatgggggctcatgtgactgcttaaagcacagcaggaaggtggctgagcgyagccctgggcgggacagagcatggtgaggggggaaggcagtggtgacctccctgctccaggtgctatctggagcatgctgggtcagacccagcaagacaggctcagaggagttaaagaggttcatgcgggtgcgcagaagttgtcagatggagatccagagtttggaagggaagcggtgaatgttgcaggagtttcagtcgacctttattaacaaccaaaaagtacctctagagttcagccctccttgactcatgtcctgcttttcttccaagtagttggatgacttgggcacatggctccatttctctttcctcctctttcagtgggggcctggctggggcagtgctttcttaccaacaccaaacatcccaaacccccattccccaggcccagaggcttcaggacggacatgtgttagaagcactccacagcataacacayggctagygcaaaaccctgactaaaatgaggtctatgtcagtgctactcaaacacacatgtgcataaagtcacctgggcatcctgggaaaaaaaacacagattcctcatcaataggtcaagagcatcctgggcaacatagggagagcccatctctgcaaaaataatcagcccagcatggtggtgcatgcctatagtcccagctacttgggaggctgaggtaggaggattgcttgagcatgggaaattgaggctgcagtcagctgtggtcacaccactaatactccaatytggatgacagagcaagaccctgtatcaaaaaaaaaaaaaaaaaaaaaaaaaaagcctgagtctcagggcaaggtctgagactctccatttctaaccagcttctggggtgggggctgctgagatttcctggagtgccttagatccatgattctgaaattcacccttattcttaattctaaatcaactcctaggtcttaaaaataggaccatattctcaggtcctctgatttcaagattccctggggtaagccccagatgcgggactattttaaagctctgcaggtggttctactgtacagaggaagactcagtctggttttcccaaactgcctccaacataggaatcatctgaggagcttaggacaattccaggagttggttctgaccctcagggaagctgggaaaccactgccttgccctgcccagcttttcatgcgctttcctgggttgggatgtctctcaagttaggctctctcctagttgggctggcatgyccctaaaacatgtgacatatgagacacatagctgcagctacacaggagataggtacatctgcccacagcagggtcctgaaggctggtctgtcactggagccaaatgaagctcagaactgatttaaaacaaaaataaactataaaagaaggtgccaagggctataamaaacaattgtctccacttcaacaggacatggaggtgacagcagaggaacttgagtatgttttaaatgctgtgctgcaaaagagtaagtgccaaccccatcrgggtcctggggcacctatggagggacaagcgaccacactgcctgggtcccctccctgctcctccgagccgcagatctgcttcccagggctgatttgtaggtaractttaaaaatagctttcattgtttgttttcctgattccaaaaacgatgcaggtttatagtagaaaattcttaaaaatgcagaaaagcctaatgacaaagatagtcacaaatgatctcaccaccataaataaccactcttaacatatgtgtatctgcatgtatgtacatgtgtgtcatatgcgtagacatataatgttagaatgtttcatcactccaacaagaaaccctttacccattaacagtgttaaccctgtacccatttcccccagccccaggcaaccactcatctaytttctctatagattctatttacatattctgaatattttatataaaaggaatcataggccgggtgyggtggctcacgcctgtaatcccagcactttgggaggccgagacaggcggatcacctaggtcaggagttcaagaccagcctggtcaacatggtgaaaccccatctctactaaaaataaacacacacacacacaatcagccaggtgtggttgtgggcacctgtaatcccagctgctcgggaagctgtggcaggagaattgcttaaacctgggaggtggagtttgcagtgaaccaagatcacaccgttgcactccaggctgggcaacagagcaatactccgtttcagggggaaaaaaaggaatcatacaatatgtggtcctttctgactggcttttctcacatggtgtgatgttttccaggtccatccatgctgtagcatgtatcaatgtctcattccttcttacagccagacaacattccatcgtatggatgggccctgttctgtttattcattcatctattggtggccacgtgggttgttaccggtttttggtcattatgaataatgcaactgtaaacactcctatacaagttttttgggtgggcatgtgtttttacttctcctgggtatatagttatgaggatggttccatcacaatgcaacagtctatggttacatggtggcataaccatcctcttaattatatgtttagttaagaggattgcttaactctatgtttaatgtttttaaaaactatccaactgttttctaaagtgactatttcacattttcaccagcagcagtatgggagtacaaatttctccaacaaatttaaatcctgccattaaatatgctgcaaaaacatgattcctaagggtcgtataatacttcattatatagacatagcctaaggtattgaccatgcctctctattggtcattatttcacttccaaatttttgccactataaataatatgatgacaaaaatcttcatatgtwattctttgctcggggttcttagaactagaataaatggatgaaggcgtattcccacttttattgcttttttcacatttagccaattttccttctgaaaggtcatgttaacttctactcctaccagcatcataagagagtagccacatcacagcccccaacagccctggatttagccacattattgggctttcagcagatgggtacataggtttatcttatcgggtcaactgaattcagctttcatgtgcaatttcagaaaaggacatcaaattcaagaagctaagcctgatctcctgtaaaaacatcatttccctgatggacgtatccttccaaatatttgagcagaaatagacatggatcctgggctttaagcacagtagagtaatcttcaatagtgcagactctccaagaacatgacatccttagccagcagaatagtcttcttcacagaaaataacccaaagctgggggacccccatgctgaaattggatcagaatcaagatgcacaagactgccyagtggtgggggtggggagcttttgaagggacttgggggtcttcttgccactttgggatcccatccaagggaacagagttctgtttttgtgaactttccrggaccacccccattccacttctgccgtttcccctcttcagagatttgtggtttaatcattaaaaccacttccccagggccccaaacctgtgcacccaggccagcccatcggccctccccctctgcagtcccagagctgaggtcccacgaggagcctcaggttgaaacactgctcatgtctcccttaacccacatggcacagaccagcggcaatgggaagctggagtttgatgaattcaaagtgttctgggacaagctgaagcagtggattgtatgtaacctggagcagggcttggcctctgggggacccagtgaacctagagcagaggggatttaaaatggtgcagcaggctgcaggctataggctagaggaattgtattyggacaggggagaagggaaaacagcatcatgctattccgatrcttacgggagtaccaccgtgcttccacccaagacgaaaaggaagacaaaagggagaccgacttcttttggaaggcccagtccaactgtggcctctgcggcccctagagggtagctccccsgggctggctgtcayccatttactgccaycagcgatgcctttcaggcacgctccttctcaaggcttctgctctccaccctttagaaccttttccttcggtttgatgctgacaagtccggcaccatrtctacctatgaactacggactgcactgaaagctgcaggtaaagaaaagactggagtacaggtggctgactgcatgccaggtactgcctgtgggcaacctgagcagatggcaggtcttctctctgctgcccaggaggtgggcctctgagcccagttggtgattcttaaggtcayggcccttggagtggtggcaccagggttcagacccaggactcacttcctgacaccagggccctcattttaaaccactgtgaacattggtagaaactttttaaatgtatctgctaaaaatgaacttggcctgccctctggaggcctcatagcctctgaccatgttttctggcccagtacttaacacatggctctttggtggcaagctgcagtgattccaaacttctcatttctgctctcagatggttgttatcgtggatgagacagagcatgcagcacccatggtttggggtccgcacgtccctctgccacctgtggccctgtcccgggttttatcagcatcagactctgaatccaaaatggatgactgcatcatagtttataccctgctcccttacccaaaggctgggctccaggtggcatttcccactcttgtccggtgctggatggctgtcggcatctctgtggtcccatgtcctgcacacacaaccgtagtttccacragcgctctgcagacctcccgcctgccgggctgcctgcgcttctcaccaagcacacctcacagataggggcctcctgaaccttttaaagtggttcyctcccagggaaagcaaaatctggaaacatgtccaggctcaggcctgataaaaggatgaagtatacacagccaggaccatctcgggtcctatgtgagggagaagaaaatcagatgatttataaatgagcaaagtgccaggctgagaaggggcgcctgattttcttaggggatgatgactctgtttccatggtaggaggaggaactgagcaggggacaaagggagcactcagagaggaggggcatggctgtgtctttcctaccctgacgtggtgtggggagaatcgcccctcatccccctcctctagccccaaacatcaggattctggccaaggctggcagccagcactgccgtgcaggctccagrgactctgtgctctgtgtctgacctgcctgctcctctgctggaattaggaagaagcagaaagaccctgggtggatttctgaacaatcctgtgaacacctcctagaaagtgaacatgtagacaaaaatgaaagggggaaagaaatcacttctaagggcactaattagaaatcaaagcactggccaggtgtggtggctcacacctgtaatgctagcactttgggaggcctaggtgggtggatcatgaggtcaggagtttgagatcagcctggccaacatgatgaaaccccgcctctactaaaaatacaaaattaaccagttgtggtggcaggtgcctgtagtcccagctactcaggaggctgcagcagaagaatcacttgaaatcagaaggcagaagttgcactgagccgagattgcaccactgcactccagcctgggcaacaagagtgaaactccatctcaaaaaaaaaaatctaaatatcaaatccagaaggaagttcactttgtctaaactcctcatttgacaatgaggaaaccaaagcccagagaactgaacccatatgccacggctggagcagtgccagggctcagatccaagcctcctggctatagcctgtcattcttcccccatcgtggatgtgtaggaatgggccctggcagagtatcattctccgtgggcagcagcatcccctccaagaaactttctagggccacagctggaagtgacctgagacatagaayrcgaggggaggctggtgtaggaatgaacttggggctcagacaccacccagtgttaagttcccccaaacaaagyttcctgtaaagtcagcgagactstatgggtgatgttagcatcaaaattaagatcacaaactcgctaaactcagaagccattaaacacagaaagcacgcctgagagtcccccgcacactcgcccctgcaccacagattcacactctcacgctgcattcacaccaagggcagcagtcccactgggtctggggaccccmgctttgaggagtgaaacagtggcttcctcttctgagccctctcctcagctgcctgggagctccctcaaaggtgcagactcacctcggggctcggatacagcgagtcctgggtctcctcctttgtccccacaggctttcagctgagcagccacctcctgcagctgattgtgctcaggtatgcggatgaggagctccagctggacttcgatgacttcctcaactgcctggtccggctggagaatgcgagccgtaagtgtccagcgaggctgagggtgcacctcggggtggcatcttcagtcaccctccatgagcgcatgagaaacagcctggttaaagtaatggcaaagatagaccacagagagccatggtctgatgtgtgtggacccatgggcctgtgcggttagctaaggagcagaatgtgccagcctcccctgcagcaygtttcttagcatcgcctttctttatacattcacagtgcctctgtgggaggatgatgggctggggcaggtttgtgccttgtgtttgaggaaaggttcaattgcaggtcaaatcccatcatagcatatagaaacaggagagtctcagtcccccttcctccccccttccccgccctgtaagccctagacattgacccagttatytcaaataagatttgttacaccacaaatagagagggattatgtgcccgtgcgcttcagtgtttgcagtttattgtcatagccatcctgcccctcaaaggtggttttgaaggtgaggctgagtgaagcatgtccagggcctgtaactcagtactggagtggctatgaggacatgccctgtgtgcaggtgccaaaggaccygtgccctcaagggtgcctcgtgcttggtttaatgttctggcgtttccatcttgaaagtcttcacaacttaggagcagggggccccgcatttccattttgtcctgcttggtattttctaatctrtgttccataggccacttcgaggtatgaatacttgattaaaaaaaaaaaaaaggcagggggctgggcacagtggctcacgcctgtaatcccagcactttgggaggttgaggcagttggatcgtgaggtcaggagctcgagaccagctcatagcgaaactttgtctctackaaaaatacaaaaaattagtcaaatgtggtggtatgcacctgtaatcccagctactcgggaggctgaggcaggagaaccccttgaacctgggaggtggaggttgcagtgagctgagrtttgccactgcactccagcctgggcaacagtgggagactccatctcaaaaatataaatawataaataaataaataaataaataaataaataaataataaaattaaattaaattaaaataaaaaggtgagggctgtgacccttggttatcagcatgatagctccctctgcttctttggtaatagaacactaattacttgcctgaagcacagcccctctagactctaagctccaggagagccgtaatttctggacaatcaatgagtatgtgttgattaaggaatgatgagagaaaatcagagacagaccagcaggccccaaagggtctagtatatcaagccaggaagccggctttccctaaggggttactggtagctagtgagaggtgcattctakaaagacccctcctgaaacagaatcygttattagacttacagggtggtcagagctgaccctagaaataatgagatttgctagtttctcttctctccattgctctttccctttctaaaccacccaggtgtaatccttcccagaacggggggtgggagtgcctcagcttttcttatagtagaggaatattagggtgaagaccctttaggcttaacaccatccactctggcatcctcacattagatttgcctggagaacttttagaattaccaaggatggagctttgctgcagtattattttaactttttattgtaagaatgycaaccctccagttagatataaagaatcataataggttcccatgcactccacatcagcacttctcaaacttcgctgtacattacaatctccaggggtgcctaaagaaatgctgatgaccaggctgcacagttgaccaattctgttagaatctcaggggtggcacacagcattgggagttacgcaaattcgccaggtgtttccagacctttacacccaacctcaacaattaccatcttgctaacttttcccttgtgctcccgcaacacatacattttccccctaaataatttaatagcagatctcagaaactctgtccattcatctgagtatctccagctgatagacttgtttttagcatcatcttcataccrtttgcacacctaacgaaattctcagcaaaccctcaacattctctagtgcccggttcatgcccaagtcttccaggccacctttttacagttgcttggttgactcaggatccacacaagacccagtcaccatgtttggttgttgggtctcttccatttcttgtgtccagtgatggtcccccaccccgctttgggttgtattattaaagctacccgwgagattctcaagtgaagccagggctgattggctcgacctcgtcttctgaaggtgaggaggctgaggccccaagagggcagtgacttgctcaggtgcactcaggtcactacaccatgcggtagacccagcccccagctcagtgctggcacgctctcctgtgccactctgtcctctgacagcacccacggcaccttcctacaagggcgagactaacaactttcagattcatgcaaaactttacgtgcgtgtgctttttttctggggcctatggatttcaagggccctgtaccccccagaaggttaagataggggcgttgctttggctccaggagctgctggccggctgactggcttaggtgaccactggcttgctacaggactggatgcctccatccgttcagagaagttcaccttcagcccgcccttgatgagagtcccatcgccgcccttgatgaaagtccttgtttaccaccagatggagcagcttccccacaggctccactggaaggccctttggtcgctgggaaacaaacttggtaaaggaattgtctttaaaaggatgcctttcccccttctytcctatcaggggtgttccaggctctcagtacaaagaacaaggagttcattcatctcaatataaatgaggtatggccaatccagaccctctgctcagggacccagctggggcccagcagagtccacgctgcatagatgtttgccgaatgcttgatttcatgcaagggctgacatctagctgtgggagtgattataacaaaatagctaatatttttgagatactatttatcaagtaatcaattaagccattacaataattctgtgagctaagtaccaatagtatccccattttgcagggtggaaactgaggcatagagagattaatcaccttgacttgagtgagtgagcagactctgccttcttgtccttctcttccttctgtcatttgggtaacttagcctgcctgccttccagctgccagtttgctcactctcccttgctcatgttgtcccgtggttcccatgacactcccccagactccaataagtacaaaactggccagttaccggggccaytgtagcaatgacgggggtgggagaccatgggtctgagtgtcagaggtatgggagaaggattcyagggggtttcaatcaccctctccccagaggatcccagtggacccatctgctcacagggaggtccatgggccagcagcagcataggcatcacttaggagagagcgttggaaatgcagagtgccaggccctgccccagacctgctgaatggaagtcgtctttcacaggaccccactgattcctgtgcacatgaagcttgggaacgctcttgagacattctcctgcccaaaggcagaggggaaactgtggagcagtttccttcaatggttctgtaatttttatctcccttttccttctttccctccctgtatctttctttccaggtctgctttctcttctacctaacaactctgaagccaggcagcctgtggctcctccccagtctctggagtttctcctctccaccaatttccatactcacagtcacagccagctcatttccaaattcattagtaactttgggtttggataacatttaattgaatatttcaagatgaagaggttgatgacagtatgtgttttagaggattgtacctcctcccctcttttgtgctctgatttcgattaagcaggctgctcggtgcctcagtttaaccatttacagaaagagacataggccttaatattacacccaaagctttgctttataataatatcatataatttggcaattatgttgactcaccactaattttctcaagtgtgtatctcagatccctggacgcattattatttcattgagccaattacgtattattacggtgagccaaatggggatactattggtacttagctcacagaattattgtaatggcttaattgattacttcataaatagtakctcaaaaatattagctattttgttataatcactcccacagaaactaggcatttttcttctctagttttgtctttcaacttcagcatgtargacacatgtaataactatacctcctttgatcaatccaagattccaaagaaagatgtgcacacacaaattattcttttatgaaaataagaggaagctgggcatggtggtgtgcacctgcagtcccagctatttgggaggcctaggcgggaggattgcttgaggccaggggtttgagcatgcagtgagctatgatctcgccactgcactccagcctggaagagagtgatagcaagaccctgtctcttaaaaaagaaaggaatttgtaatcccagcactctgggaggctgaggcgggtgaatcacgaggtcaggagatcgagaccatcctggctaacacggtgaaaccccatctctactaaaaatacaaaaaattagcctggcatggtggcgggcgcctgtagtcccagctactcgggaggctgaggcaggagaatggcatgaacccgggaggtggagcttacagtgagccaagattgtgccactgcactccagcctgggcgacagagtgagactccatcaaaagaaagaaggaaagaaggaaaagaaagaaaagaaagaaaaatragaaagaaagaaraaagaaagaaagaaagaaagaaagaaagaaagaaagaaagaaagaaagaaagaaagaaagwaagaaagaaagraaraacaagagagacccctaggtccacctttatttatcatttactttaaggtaaatgataagtaatgtcactaaaaaacatgaggaagtgtgatggctgcccctggtccatggtggaaggagacagtgggaaggtttgttactcagcggccccctggctagtcaaaggctccagagcaccagcagtgtggaggaagtattccagtgctgcagcttcaaggtagaagtgtggacacctctaacgcaagtgtccacaggtgtaggggctggaataggctcctgccctgccccatatcatcaccctgcagtacaacagtgaaaaccattgcattctctccctctaaacctaccatctttacatctggctgcatgttagcatcacctggggagatttaaaaatcctgataccccagccactccctagatcaattaaatctgaatctctggaggtgaggcccaagcattgtttttctttaatccccttggtgagtccagtgtgcagccaggtctgaagtatccatgttttaaagtccctctccttttcccctgacccatcctaggaagcaacaggagattttcctggctgagttggcctcacctgcaatcactttcctaaaaaggcctgtgcacctttcattacagtagctctcatactatatacactgtgcccaggarggaggacagagaagggagaaaaaaaccatctcatataatcacrttgccccaagtcaccatgctgtaataaacaagctgttgggaaggaggaggcagggtggactcgggagagaaaatgaggaggaattccatgctacttctccttcagctcacttgtaacaccccccagctatggaacctgcttccacttcctgcagcccctccagggtggagggccacctctctcccaaaggtgagaggacccctcatcaacaaggaaaagtcacttaatactgccctgcccaagatgcttcagcgaggctgtcctcttaacagggagaaagcacattttcccgtctctgtcttaccaactgtgcttgatatgagctcacttggaaaggactcaggtcctccagaaaatgtcaagtgctgagaattcatttattttctttaaatggtttcctgctgagacagacatccaagttggcaggcaaaatgatcaaatagcagatctcctgtgatatcagcaaactggggccactcctgaggctgaggctggaagggacatggaaggacaacgacccctcatctctctctctctcttcccagttcatccatttgacaatgaacatctgaggctgccttgtagagatgcagcctgcccagctgaatcttggcttctggaccttgaccttcagaacttctcttggtgtggaaccattacgcccagggttcactcccctctcatcgtccggccttctcccttcatcttgatctgggaagaatgaaatgaactcagctacactctctgattttgtgctactcctttgtaaagtcactgccttaagggggctgatggcgccacctgtgccttacatccaggttcaggcatcactagctttcccacactctactttccttatttccttccattaagaattactcagagttctaacgcacagaatcctgacttccatgtagctccagtcattgtgatcagacatcctttataaaacatgtttttataaatgtgtatgtggaataagatgaggaggaaaaggagtgaggtcataattyagcatttctgcatcataagtgtgcttccttatcagggaagacatcaggtagttccgataattggacaagagtggatctccgataagagtggatcaaggtgacaatctctacctcctcctacgagaggtggtaactaaaacagtcactatccagtccagacattctttgtgtctgaagactttgggtcagaaaagctgaatgatattatttcttctcaaggagtccagattctggtgaggtttgatcttactcatccccaacatgatgggggawaacagacccgagaatcctcattatagctcactagtgctgaacaggagtatccactgaactagaataatgggaggtaacatgagaagatactggctcaatacatgccaagccccacattcttactggtacacttgtggcagatgaggtggaggatgggagcgggagataccgagagggaaagagggagaatggctgggatgaagatcaagttagaagtggaggctgagcatggtggcttacacctgtaatcccagcactttgtgaggccaaggtgggaggatcacctgaggtcaggagttcaagaccagcctggccaacatggcaaaacccaatctctactaaaaatacaaaaattagctgggcgtggtggcgggtgcctgtaatcccagctactcaggatgccgaggcaggagaatcacttgaacccaggaggcagaggttgcagcctggcgacaagagcgagactcagtctcaaaaaaaaaagaagtggagcttcatcagaaccctgtccctgatcgtggccaaggtaccatgatcttctcctttaccttccagcccttccctgggttcacgcagcagtggatgcaggacaagagccctctctcaggagcaggcttaggaccaaggctctgtgctggggcacgccagtacaaccccagacatgccatctcctgtgctcggcctgtgcccactctcatcgatgcacactgctgccatattgtttgttagatgtcgtgaacactagccctgctcacaggtaaaacttggaaggggactcaccatatgagcttctttgtctagtgtcactcccacagggtgcctttaggcctttatgtccaggagcacataactgtctctcactgatttttcctctgcttgaaaggtacccaggaaatgaagtttatgaactgggcgtcctgttttctttccatccatatgtccctgggaaagttattaaactctctgagacttagtttcctccactcacaaggatggtaatttctgcctcactgagatcttatgatgaataaatgaaattgtaagtagaaggtgccaggcacagtacttgacacataacaggccctcagtgcaactaaggcccactgttgtgaaccagtgttttcttaaatgtctaaaagagttacatactatcacatgctttcggtttacctctgttcttcattgcaagaatccaagaattatagaaccagtcttgaaggagagttcaatagagctctacagactattatatgatcatgagttgagaacaaaaaaaagtgtatgaatttagcttctatttgtttctgaattacatggtctgatactgacacccagaaacaaaggaagatgtttcacatgcatgagtttgattaactataattaaagtgattttgtagcttataattcaaaccaacagcttttgagtgtgaaaggaataatattagttattacaccaggacaatagatgtaaactggagctgtcctaggaaaattgcgatttatggccattcacattatgtctatcaccacctgcataatatatgctttaggtcttrgcaccaaaatattcgtgccctactacctttaaattaaacagtggctgggcatggtggctcrcgcctgtaatcccagcactttcagaggtcaaggcgagcagatcacgaggtcaggagttcgtgaccagcctggtcaatgtggtgaaaccccatctctgctaaaaatacaaaaatcagctgggtgtagtggtgcgtgcctgtagtcccagctactcaggaggctgaggcagaagaatcgcttgaacccaggaggtggaggttgcagtgagccaagatcgtgccactgctctccagcctgagggacagagcaagactccatctcaaaaaaataaaaaatacaaaaaaaaaaagagagagagaaaacaaaataactgggtgtggtggtgcatgcctgtaatcacagctactagggaggctgaagcaggataattgcttgaacccaggaggcggaggttgcagtgagccgagatcgtgccactgcactccagcctgggtgacagaacgagactttctcaaaaataaaaataaaaatwaattaattaaacaatagtatacacragctatctaacgctactgcttcacaccaaaatcacatgaaatacaaagagatacacacctagacacatcaaagtcaaactgttsggaaaaaaagagaaaatctgaaaagcagcttgagaaaaatgactcatcatgaacagggaacaatgcaattagcaactgacttctcatcagaaatgacagacgacagaaggcagtagaatgacattccaagtgccaaaggaaaaatctttcaatcaagaattctgtttttccactagaactgcaaaaatgaaagcacaataaagatattcccagttaaacaaagactgagagaattcattattagctgacctgccactggaaaaatattaaaggatgtatttcagggtgaaaggaaataaaactagatgagactgtggatctgtagaaagaaatgaagagcactcaaaaggatatctgtgggtaaatgtaaaagactatataaacgtgttatcttccattctaattttgtttgaagacattagattatataaagcattaattattgtactatgttgttggatttataacaatagagagakatattataaaggagagaggaagaaacaaagtattgtagcaatatttctatattttcttagaattaagtcagtattacctcaggtaatgatattagatattagatggttataaattaagatgcagattgtaatctacagagcaaccactaagaaaataactcaaaaatacagtaagatagcagaggaatcaaagcagaatacttaaaaaaaatgtttagcacaaaagccgtaagggaagaacagattttaaaaataagacatagaaacaaaatggcataccttaatccagccatgctgataataatattaaatatgaataaaaactacaatcaaaaggcagtgattgtcaaaatggataaaaaagcaagattcaattgtacactatctacaagagatacttcatacaaaaagacaaaagttggaagtaaaaggatgaaaaagagagtaccatgcaaatactggcaataagagagcttgagtgcctacatcaatatctgagaaaataaaatttaagacaagaaatattattagagagaagaaatgatattacagtatcataaagggtcaatacattaggaatatataataattacaagtgtgatggtacctaatagtagagtctcaaaattatgaagcaaaaattgatataattgaaagaagaaacagattattcagacttaacaattatagttagagagttcaataacccatttttaataactgataggacaactattcagaaaattaacaaggaaatagaagacatgaacaacactatcaaccaacttgactaactgacatttatagaatactttaccctcaagtaatgaatacacattttttcaaaagcacatggaactttctccaggttagaccatatactagaccataaaactaatttttaatatatttaaaagaatttaaatcactcagagtatgttctccagccacaaaggaattaaattagaaacaaaaataagtttgggaaatcctcaaattttagaaattaacacatttctaaataactatgagttgaagagaaaaattacaatggaaattagaaagattttgaactgaatgaaacaaaaataaactatgtatttacacatgtctatacacatccacattaaccggattaagctaaagcaggacctagaaaagtagagtgttctcaaaacaataatttaagcttccatcttaagaaattagagagagaggcaaattaaaccttaaaaggaaagaaataaagactaaagcagaaatcaattgactagcaaagagaaaaataatagagaacatcaaagaaacaaaaaggtgattcttaaaaaagattgcaaaattgataaacttttagctaaactgaccaagaaaaaagacagaaaacacaaattaacaatcaagaatctaagagcagcygtcattgctgacccatcagaaattaaaagaatgataagtgaatattttaaacaactttatrtcaacaaatcagacaacttagatggaatggaaaaaatcctagaaaaagataaattaccaaaactaccttcagagaatactgaaaatctgaatagacctatgcattagyccactgtcacagtctaataaagacatgcctgagactgggtaattgataaaggaaagagatttagttgacttacagttcagtatggctggggaggcctcaggaaacatataatcatggcggaaggtgaaggggaagcaagayaccctcttcacaaagcggcaggaaggagaagtgccagcaggggaaatacaagacacttataaaaccatcagatctcatgagactcactcattttcatgacaacagcatgggggagactgcccccaagattcaattaacctccacttggtcctgcccttgacatatgaggagtataaggattaaattcaaagtgagatttgggtggggacacagagccaaaccatatcaacctacaacatgaaacatatcataccatatcaacctataatattttggtcctgagaccaaatcctttggacagtgcctggagagagcctcaggccacagtcatgtttatctgaaatacagggcctacytccaggctcctctccaccctgtcctgtgcagagctacgcagtgcgctgaggggccagggcttcagaaagcccagagcatgtgacctggttggcagaggtaccagggtcattggtgccagcccaattcagtgtactggatcattagtagaaacaaagcaccattctactgagagccaagaccgcctgccaagtaccagtgcgaaggctgcctcgtcaccacagctgtgaatcaagagtaggctgtgcttgctactgatgccagcctggggcattttcccagccccacagtgcctttctgaagtgggagaaggagaagcagagggttagactctccttggtgcctgaacagtgcctctgatggaagaacgtagctcagtgatattcccaaggaggtttattggttcattatcagtaggactctccaaggaaagggaacagctgaaccatatggagcaactgcaggctcatgtaatagaagcagcattgaacttagagtttgagtcctgtattctagtctagaacttacctccagctagctgtgtggacttaaccatatcactttacctctctgggctgccttgcaccttgaaattatgtgattccttctctcactctgggaactagaaggccaggtcagtgtggctcagtcctggtctaattggatggatggagagaaggtagcagaggtgggcccagcaagcctgagaattcatcttactccctgacagagctcagagttctgagaagaatgtggtcacgcagaagactctctgtaggccacatcaggaccaggcttcttggaaagctgtactcctcctgcctttcaacatcttaacacactcagctcctccattatacacacttacctgaacccagcttgtctgtatgggtttagcattctctcttgtccttcccagtctaccctctacattctaaaaagagagtctcccacccagacgatctccttgcagtcacttttcaatgcaccagaacagcttccttagttggaacagtgaacagtgtgttttcaaacaaaaggg

SEQ ID NO: 9846 - DNA, 24002 bp, Homo sapiens
tttctgggacacgacaggataaaaaaataaataagtgcaagcagccattcattaaacgtttagccaggatgctgctttaactgcatcccatcatatctcattaatcttcacaccagtcctgagatcaggtactattattaacccgattttacagatgtgaggaactgaggcttaacgaaggtaagtaacttgcaggtgcgggtatccagctctctaactccagagcccatgctcttaaaaccctattacttgtccctggtggaggtgaacactgggggccctttcatataggactagccctcgggctgcaatctgagcggaaaagggaggatgagggcatacttcgaagcttcttttgcataactggcgctggatttttactgagactttacgttacagttttttttttttaattttcaaggtgcttttacgaacacatgaataaaatatttgtgtcattttgaaccttacttgtcttattttatgcatgtatttatttatgggggggcacaaggactcatctgtggtggtgcagccactgtaaataaattagtgaaactacttcacgtcaatttctgttcagtacactttagtgatggatcggaggaaattaatacatgtttacaaaaagcccctcccccagttgttacatatgcctcagagataccagttgtgaaaagtgcaggtgcacttacacacatacgcacacacaccccacaaatggtatcatacgaaaaaacatacctgcaatctgctttgtccacttaattgtatatcttggatacagaacttgtttcactggaaggctaaaaggcaaagtctggggaggcctagaggacacaggggatgggaggaggcgctctgagctggatgtaaggtctccacccacggccagagcacaaggtcggataaccagtgggcctgccggcttggctgcctgggccctcccctgccgagacaaacggctggagggaggaagtgtgcggctgggaagctccgctgctctggcccgggtttcccatttcccccttcccgcgctgagacggcgaggaaagttagcccggaaatctgcgcccgcctaaaacccggcctggtcccagccaccgccccaggaacttcccccaccgcaggggcggaggtcgagagcagggatggagaagtggacctgcgcgggtggactccggggcgcgggtggactccggggcgcggggggactccgaggagcgggtggactgtggggcgcgggtaccgtctcgcagcgacctctgtcggcggctctggggatggcccgcatctgtctgcgtgtacctggtatacgtgcaggtacatgttcctgttcacgtgcagactgggcgggggatgggggggtccacaccggtgtacacctttgcatacctcttagcaacttgaaattccaccacgagagatatctttattccgctattcctgtgcatctgcacggagcccctagggccatagatttgtgtgcaaatgaaatgaggatgtagtctgggtgcccaagggggggtgccttgagtgtggttgtctgtatgcctccctgagggtatttcactttctgctcccatccgcccctatgagcgagtacctatgagcacaggatgtgcacatatttgagtcttattagtggtacacgcagttttatcatctccccaggtctgtgtctgtatgaaatgtgcatgggtgtgtgtgtgcacgcgtgtgttcccactcggggaatgtggggagaggtgcatggagccaagatgggtggtaaatagtatgtttctgaaattaaaggactaatgtggaggaaggcgccccagatgtactaaaccctttgcccttcatctcatcctctctgacttgggaagaaccaggattttgtttttaagcccttgggcatacagttgttccatcccgacatgaactcagcctcccgtctgaccgccccttggccttccttcttcctcgatctgtggaacccagggaatctgcctagtgctgtctccaagcaccttggccatgatgtaaacccagagaaattagcatctccatctccttccttattccccacccaaaagtcatttcctcttagttcattacctgggattttgatgtctatgttccctcctcgttattgatacacacacagagagagacaaacaaaaaaggaacttcttgaaattcccccagaaggttttgagagttgttttcaatgttgcaacaagtcagtttctagtttaagtttccatcagaaaggagtagagtatataagttccagtaccagcaacagcagcagaagaaacaacatctgtttcagggccattggactctccgtcctgcccagagcaaggtaagcacttcccaagcccctacctccctcccctccctgtgggcctgcagctgtccaggtgtagaaaccgttagtgtgctaccccagcagctggcaggagggagttggtggattcctggaagcatccctggtgagtcatctgctggaacattagtgaaaacttagtactctagggaccgatgtacagtgtccattttaaaagccacctaataataactgtatagcaagatctgtgtgtatgcatagtttgtggaaatgtttgttttatcttattttgaagtggtgtgtattgatgtataaaagtatattcctaaatgttaatgcccatcagttaaaggattgtatagagctaaagtgagtggtgcctgccttactattgaaatttttaaaaagcctttcgtgcattccttaaagtaattggattcataattataataatgttacaaatcagacttgctcccatatttgtgatggtcttggtcgtcagttgtgatatcaaccaaaatgacagctgggatccccattcttgtggattaactaactttggccccagttaaaaaatgaaaagctattattgcttcctaaagagtttttaaatctgtgagaagggggaaaaaaaggtttttttacttgcccaggtaaaattgtrtgcaacaacaatgtcattttaacaaagggattactaaaccccaggtgatgacccactttttcaaacaargaattgcaagatactagatggaatgtgggtaacctcttagagtttagtttactggaatctgaaattgtatgatttccgtacattccttcatgctactaataagtcatggaatccctctgtgctggactctgggggtaaagtgcaaaacaagatagacatgatccatggcataagagagttcactcagtgtggcagagaagacaaacagtaaagaagagactgtattgttgccattgtagtaaatgctgtggaaggaggggagcaaatagtgggtcctgacttcatctaggcaccatgacacttcacgtgaattatgtcactaactccttaccacartagcatgcccattttatagatcaggagtgtggggcttaaaggggccaagtgactcacccagagtcacacagttctagaagtctgcctggccctcaaactagggatctttgcatgtgccacccatgccatctgtgactatatctttttattctttaatartaactcccttttctaattaaaggtaacaaacaaaacttaaaaaagagatgcccacccaagygtcattggcatgctgatgttggcaccagtgttgggaagcccttagcatactccaggaagtaggagtgtgtaacgtggggtccctttgtccttcatgcaagggtttcaagagtttagaaaacctatgaaattgcacacacaaaaatgtgttttaatcatcaagactctcagacttaccatgctgagaaatgtgggctgagggatagygctccctagtatcagctgatgggccagagagccaaaggaggagacccaccaccatcacctctcctggacagtgctctgtggtttcaaatgtaggtgatactaaaatgggagttgyttcttagaaccatggccggggttcccttgaccctgaagtgcagttcacctgagattgtcaaatgcatctgaggcatgcagaggaagtgctgggcacacagctagtgggaatacctcagcgtaagtggccaggagatgccaggaatctccactatttcccttccagtgtgccagcctctgggttttacaggcgcatgtaattgcagtacctctgtgcacatttccctactgcctagaatgactttcttgactatccatgatatataaaacacagataccraattgttcccttacctcttcctctaggttcaagttaatatgttattggttgccttctataatatgttatctcattgcctttcccaacaagyctttgagataagtattaggtccattttatagacaaagagactgaggctcagcgagtaacttggccaacaagttgctcccactgctcaacagcaaatgagcggtgggaccaaaattcaagcctgtgtctgtttaacttcaagcctgtgaatgtactaaccggtgccctgtgccagctagtactttgctacagtcataacctagactgaagtgatagccatgcccctaaaactccatgctgtggtgacagcactgagcagtgtccaagaaggcttgacttctaggcctgtctctgccactcacaaactttataagggaataaagtacatagcaaggtccgcctagasttagtagcagttctgacaaagctgtaatttgtcaatattccrtcacccaacccaggaatgctcatttttaaggtatttgactgaaacagttgagcattgcccttcatatagtttaaaacagtggtttcagaaccactttcctccagaccatgggtgctctgcaaggtgaatggagttgtttcagaatgtttcaataatcatccctacctcattcgtaagtggcatgtaatttttgcaatcggaagattttcataaaccctggatactaacctagactggtttctatatcagatggtggcttatttaacataaaattatgcattttactatttcatggtggatatatcaatatgttgtggtcttttcccaatgaacactttgattttcaggggttctggrccctgaacatgggttaaaccagtggttctcaaggtgtggtcttagcgccagcagcatctgcttcccctggaaactttctagaaatgcatattctcaggccctcatgcctgctgaatcagacactctgggggtggkactcagccgtctgttgtagcagtgcttccaggttatcctgacagtcactcaaattttagaaccactaggttctctatatgggagagagtagtctttgaacttggaaaacaagagaagctaaacccctrcagcaakggctggtgaccaggtcgttgccagaacctgaaagttcgcctctgtattaccgttcctgtccctaacccaagtccttcagttctgggtgctccagcacacactgctttgtgctgcagtgatacaaatgtatggctcatctccccagctggcggggaggcatttaacacactgacttaataaatatttattgagtaaaagtatttgctcctaggaagcgggatccaggtaagccctttttttctctctcaactgcttctagcccagtkctctttatgtagtaagcactaaataaacaactgctagatgttgatccagaaagtcacattccttctctaagctttaagtttctcatcttaaaaataagaggattgtatcagatggcttgccttaggtctctttcagctccagagccccaaataccctatggttctctatttagagatgttcttccccacagactgccatagaactcctgtaatttacttagtatttgcttgacagtatggagaagaaaggggagaatcaagattttatttaaaaaaaaagtagctagaatgtgtatatggttcacaaaggtaacaagaattattgacattctttcttctcttttttcttcctcttccttctcttttcctccttctcttccccctgcttctctcccttcttatagatgtgtcaccagcagttggtcatctcttggttttccctggtttttctggcatctcccctcgtggccatatgggaactgaagaaagatggtaaccagcctctcattattctctgtggaggccccacttctaagccaggactcttgggcagccactggtgggaaatcaaactgaaatgggcaaccatgcactgggtcctctagagaaagccatcactctgggaaaatgcaatgccatatctctcttttctactttgatggtatctatattgtttggttttcacattggatgacattggtacactatggtggggaaagacatatgatatatgatatggtggggaaagacatatgacatatgatattttccaatattactaaaaactgtttcacacaattaaaattccaaagtagaggatttgcaaagtataacaactgtgttcgtttctcattccaccacatgatactgccccctcagttggcactgtgatgacttacctctgacmaagcactttggaggaagcayaggattcagactcacattgacttgggttcaagtcctaggtctgtcaatgactggttatgtgactttaagctgggtcacctctaatcctgaatttcctcaactgtaaactggatgttacaaagtggatgcctaccacgtgggttatttagtgggttaatgaatgcagaatacaactcgacagatagtaaagtgaaagtaaatgtcagctagtattactattttggttgtttaaaatatctttcatgattcaagagatactttttattatcccaatgatcagtaaaaattawtagtagactaatagaatagttaatggtaaaataaggagttctgcccatccttctagtatctcacactcagtaaatgtgcattctgaccgttggctgtacctgaaagaccctcagatttttatcactgaagccaacatcataatgttggcgattactatctttaattgtataataataatagttaatgtttattgagtgcactgtctcacttaattctcacaagagccatatgaagtagagactgtctgtatcccattttacagatgttggaaactgaggccagagagattaagtaacttgcccaatgtcacatacctggtaagggtggaacagggacttgatcccaattctgtcttgcttcaaagctggtgcacttaaatttgtgaaaacgtttttacaaggacatgaagtaattttttcccaggtctttggagagctgaataagaggaaatggacataaattaaggatgaaaatatttcagctgatgatcagaaataatcttttgatattctagaaagtaccatcttgaaatgggtacctgaaagaaatctgggaccactcctctcttctcaagaattttaggaagacagaatccagccaccccttctccatgagaatttgagagatttagacactctcttaagtaaaggcaaaggcctgagccaggggtatatggcagatcccttccaaccctgggattgttagcragctcaggaaccttggtcctggcatatttgaccccttagtgacttctgatttggtaaaccacagaaattccagaaaatcagtgtgagaaactctcygaggtgtgacttaggagggcagacgatrcagtgargctaagtgccaggttcttgatgctcctcttcagctttcctcctgcagctgttttccctgctgttgagcaaacatcttctagggcttccgagcctcagttgggacaggaaagtaaccatgctcttcaggtgtcagggggacaaaaaaaaaaccaagaaaaagccaaaagtgccacatggttttacatcagcacagctaatcatttccccagagttggaccccaaatgcttttgacctcttatttttgttatccattcagtccttataatccaattgatgtaaagtgaaaactttatattctacaatgctttacatccagaggccaataacgagaaccaccatttataaagcatgtaagggcactgtgtatgagcttatataatccacatatccaccttctaaagcaagggctaatatttttctcattttaaagatgatgacactgaggcttacagtagttgaatgtcttgccaaaggccacaagactggagcaagggctagagctgcttctaaatccaggcctctgccactccaaaatgcaggctctcaaccactgtgactcataaacttgagcaggcatcagcaccatctggagagcttaagaaccatataactaaatccatcccaaggtttctgattcagcagctgagaatttgcatttctkatctattccaaggtgatgctgctgatggtgtttcatcgatcatgctttgggaactactacattaaacaattctattcaattaataatttatgcatggattaaaaaaatgaatgaagctttgctatgacacactctgaaatactatactaagccattcctcaaaggccagtttagacactagcattaggcatcccttgcaaagcccaagagacaaaaggtctgagctrtagcccttrtacttctgacttgctgtgaccatgcttagatcgttggcctcagtacgcttcttcattaaatgggaagactaagctctactggactgcttcataagagtgtaagatagctaaaaawaataataataataataataatgcagagagaatgaaaatctccactggtgatttaaaacagagggaacgaaatccttaaatatccatggaaaattgttaagagagtttctctgtacagttggctgactcctcrgtctayaagtaacrataactaacaccgaatttactgtgtggcagacactgtgctaagtactttacgtgctttttttttttttcatttaatcctcagtcaaatgtaaggcagatactgttattattatcattttacagatgaggaaactgaggctcatgataatgaaataccttgttccaaatcccccagctggttagtggagmcaggatgmcagtcttggttcrttgttctcgacaccctgagcttttaaccactatgttactctgctgaatattgtgccctgccgtattctctatgaaactgaaattgtgctggaagtttctctcccccagacctttggcaaagagtcttgkgctgtttgcagtttttggtatattaaggtgtttccaatctgctaaataatcaaaggttactrttaaaggcagccttccagtcaatgagtcgatggcwgctataaaactctttgtttctcttttccatgaccttgagcccaagcagggtctcatgccttgagatcatctcagcaagcatttgccaaatacttgttgtaaacaaggttgtgtttaggcaatggggatgcccgaagggttaataaaacacagtcccagagttcctggagcttacagcctggttctccactttatgtgcattccagtttatgtcrtagaattggattggtatccggatgcccctggagaaatggtggtcctcacctgtgacacccctgaagaagatggtatcacctggaccttggaccagagcagtgaggtcttaggctctggcaaaaccctgaccatccaagtcaaagagtttggagatgctggccagtacacctgtcacaaaggaggcgaggttctaagccattcgctcctgctgcttcacaaaaaggaagatggaatttggtccactgatattttaaaggaccagaaaggtaattctatacccttggatagtatcaattttctctttcgctcataagrgttaaaaacaacaacaacaacaaattgaaaagccaagtcatggtgagtgtaatgaattaacatcaagtctcttattgatgttaattgatgttaacctccattttcctttgctttcctggaccctttgggttatcaaccatcaaaatctcatattaagggagtttcatgatcagtctgaatgcttagcctcatgttttctttaaataatggtgatattatttaatggctaatggaaattaaccgatagtgtatcactctgcactggggtgatagccttcaaaaaatgaatgcctctgccaggcatgttaggtgtgtagtgtactctgcagaatcaacaccccactgggatactcccaatccttatggagctacccaagaggcaacgcatggaagaacttcaccctgtaccatctggtgatctgtgattcatcacaatcaaaacctttctgcaaaaaactcctaaatattgaatttttgtttttttcaaatccagaacccaaaaataagacctttctaagatgcgaggccaagaattattctggacgtttcacctgctggtggctgacgacaatcagtactgatttgacattcagtgtcaaaagcagcagagggtgagtgaaactgctctggtttctcagcatttttctagaactatttcattaagaaattaagggcaacctctcagtgacctatcagttaatgataatgggaaaagcaaagtcaaacccgtgttttttcaaccgcccttccttgtctacattgaagaaagaacatggagattttagccgattgcttgaataaatgtatgtgttggggcaggatattattgggaactgagaatagtctctgctgtgtttgaacccactcatccaaattgcctggccatgcttcctgaagcctcatagcaccaaagaaagggataaamggagaattcaaagctacaaatgacttgctgaaattgcaccttgagtcaaaaataaaaacaagagctccagggcgtagatcttaggggccctgaagcagactccaaaactcgatgaggcctcccgaaattttcccagggccacctcaactccttttacttctgctgacaccactaatctgaagttcgctgttggtccaatgcacctggactttccgtaagaaagcaacttccataaatacaagacctatgtgttaacccccatgtggcttactttaatcatcaccgaagcaaaccccaggtgatcatcctgactttaccattatttcactgagtaaattaagcattggggtctcactttttcatctttaaaaggaaaatgcttactaaagaaatgtttctccaagtgcawaaagacataatcagcagaggaatggttaaataaaacatggtacactatactcttgcttaatgtgcagtcattgaagtggataacccaacccatatgttttgtcatggagagctccccataatatgttcagaggggaaaaggatggttacataatcatatgtatacaatttgatcctagttcataaaaataaaatctatatgtataagtaaaatatatatagtggatatatataatgtagagatgtatataacatggattatatatataatgtgtgtatacatatgtgtgtgtgtgtgtgtgtrtatatatatatatatatataaaatgtgtatacaattatcttgaatattcattgaaaaagttctggccaggcacagtggctcacacctgaaatcctaactctttgggaggctgagacagaatgattgcttgaggccaggagttcaagaccagcctaggcaacacagtgagaccccatctcagaaaatattaaaaataaaaaaattaggtgggtgtggtggcacacacctgtagtcccagctacttgggaggcagagggaggggatcacttgagcctaggagtttgaggctacagtggggtctgattccaccacttcactccagcctgggtggcagagcaaaaccctgtctcttaaaaaaaaaaagagagagagagagagaaagaaaaagaaaaaggaaggtctggaaggatacaacaagctattattagtacttaaacctgtggagagcagttaaggatgaaggagacatacacttctttcctttatatggatctttatcatctttacttttataattagtgtgtactgatttgtgtattgattttataattaaaatgggaaaaaatgaatttaagtttttaacaagggggtttaataatcagagattctagatctaaaacaaacaaaaacttccatattcatttagtccagagacatgtaagtgctcttgaatttaagctttttctcctggggagggcagtttcttaccctctgggtagaaatcagcccagttggagaaactgtgtcctcagacaacagttgaggccttacctgccttactggctacaatcactaggaactctctccccaakgtgtaacacaggctaatttctgtctttsacttcagctcttctgacccccaaggggtgacgtgcggagctgctacactctctgcagagagagtcagargggacaacaaggagtatgagtactcagtggagtgccaggaggacagtgcctgcccagctgctgaggagagtctgcccattgaggtcatggtggatgccgttcacaagctcaagtatgaaaactacaccagcagcttcttcatcagggacatcagtgagttttggatgattatatgtgctccataaggaaagatactatttgtcacgtgttcacaatgccccatgcactgtggggtaggtggttgacaagcatcatctcttttattctgcatccaaaaacaaaatacgatgtagatactgttatctgcaytttaaggaagaggaaattgagtcttagaaaagttaagcaacttgccccagatctcagatcttacagctagccgttcaaatccagatccactccactacagctgctctttactgcactttgattcagctgccagatagtttccatgatgaatcccagagcctaatcaagcataatattcatattcagaaccagggcttccttactaatggcaattattcccaaccaatccttccttagcatttgaaaagggacttctttcttagaatataaacccttccaaaatggacatctttttttttaattggcagatagggatttcaccataagtcatttcctttactatttatkcattgaccaggcagcatgataaagtgtaatagaaccagagaacttgcttcaaaacttatggagggtttgtacttggtgggtggggtctagttcacatagggtggccaaggaaggcctctctgaggaggtgacatttagctgacaccaaaaggaaagatgtcagttgtgttaagagcagagggaagcatatgtgcgaagcacctgctaggagccrtgatctttgtgtggagcagtgccaggcctacagagcccaaccacacaccctagcatgtctctgcctcctcttatctagaagacctaattgaggaaggagtctttgtgaaactcactgctgtatccttcatgcacagtccagtggctggaacataatgggygctcagtattcatggaataaacaagcaaattgagcatagagacaattgactgtaactgctccaagacatgtccgcaccaaaagctatgaaaagacaaaagaaagggcagtaaatagaaaatctatcatytcatccccaggsagaggctcagcttagttccatgttcagtgcaaagtgagggattagcacagacagggtggtccttcaatgcatggcccatarccattaaagcagaggtcttctcactgtgcggtcccatctgattgttcagtgatgaggattctgagcatctctcagatcctgcaatacatgtggatctgagatgtggccattgataatgactgccttcccgaggcaccagcgtgagcacctgcggcagaggtgcctcacatttgccagccaggtgctcacagaasttaagtaactatccagtggactcacagctgatcaaaggtgcaagtgagatcataagccaaaaccactgaactccaaagccttattaggaaaataaagcatgtttatcctcttccacagtcaaacctgacccacccaagaacttgcagctgaagccattaaagaattctcggcaggtggaggtcagctgggagtaccctgacacctggagtactccacattcctacttctccctgacattctgcgttcaggtccagggcaagagcaagagagaaaaggtaagaagtgattcaggtgcagtatattccttggtcagttttacrgaggcccaccataaagtgagaagatgaatgatgataataacaatgacatccatgtatcacttaacaacagggatacattctgagaaattcatctttaggcagctatatcattgtgcaaacatatatggtgtacccacacaaacctagatggtatagcctactacgcttctaggctttatggtatagcctattgctcctaggctgcaaacctgtacagcatgttcctgtactgaatactgtaggcaattacaacacaatggtttgtatatctaaacagaaaagatatagcaaaaatacaatattataacaatataggaccactggtcatatatgtgatccttctttgactgaaatgttattatgtgatgcataattacttttcttagcacttttctatgtgtctagagctgtgccaagggttttccatgtttatttcacttaatctacaaaattaacgcaacaaaggtagctgatgttattcttgtttttttacccccttttttgtggaaaagaggctttccttttttccagaaactgtggcaaggtaaagtaaagctgtagctgatgcaggaattttgtgtaggtgttagcagcactgccctcactacgtgctcattggacagtagcccaaccccaagaaaaggatggytggtagccagtagtattatcatcatttcacaagtgattgaagactcagagaggttaagtgactttaccaaggtcacccagctaggaaatgacataacsaagacataaactcaatctgccagacagaaaggccatgcacctaaccactccactacctctgatgttggtcattgatcttggcactcagaattagtcctgatagaggagacctgggctccagaagcctaaaattgttgtttcaactgagtgcatgtaatgaatgatagaacaggcaagagatatcgcccccaaaatggatagctcctggctgttccagatattataaaattattttactaaacagaatgtctacacttatagaggctaagatattggcttcccagcttcctcrccttacagcagaattcctttgcctgttgcaaggttccagaggcccttttgtaccgccccagactcctttcaccccacttttaaaatcactggacaaagccctaattcagcatagcatttagcatgtggtagaaattcagtgagctagttactctctgggaaaataattaggtagggaggctatcctggaatagatatttacctaaatattattttacatcttggcaagtactttccctatttaagatctgtatgactaataggtgatattgagtrcttcctwtgkgctaaagacttgctaagagtttracgtgatttttaccttgaactataattctatgaagtaggcattattgttatccctatttataagtgaggaaacagacacagagaacctaagacattttcctgaagttacacagctattaagtagcagtgcyagaatttgaaggcaagttttctgatgaaatgatcaggatatggtatttctcaawatctcagggatggctagagcaaatctgtctctctctcaccatcagctcaggactgggtgagtggccatggggtcttgaggcaaggcaattgtgctagaaagatgaaagctgggccaaacgatttctccctcaagggcttacaaagtacaaaagctgcacctacatgtggagtgtctgccagtaggtggtgcaagttctatgcacacccctgtgaattgcaagcacagtgccctaagaccaagatgggcttgttttgggagagtatgcattgcaraaacaggctcagcttaccctgtgactatgttgccaaggggtcttcayagctttccttctcttttgcagaaagatagagtcttcacggacaagacctcagccacgktcatctgccgcaaaaatgccagcattagcgtgcgggcccaggaccgctactatagctcatcttggagcgaatgggcatctgtgccctgcagttaggtgagcaggccctcaaaggccascccaggcctgcactctcagtgcacctggatgcagggatatgattgggggctgtgttggagaggaaagggggatggagtggccagcacccagttgccagaatcagaaacatacatttattcactaacagatatttatttggtgcctttgttatgtaggacactgtgctggccacagggatattgcaggaaagaaaacagaccggggttctggcctcctaaagagaaaggcaaagaaaagagagaggtagccaggaggcagagcatggmggacttgcaagcttgcaggactcagaatcttgttctgggggccccgggccctgaaacccactgaagggttttcagcaaggaagtaacacaatcagatattattttaagaaaaccctcaagaaagcctctggcaagcatggtgccagccaaattccaggccacataaggaaggcctgggccttctggcatgaaatccctgaaacccagttgcccaggatcatatgttgtgagaaataagaagagacattgctgttacaatgtcaccccacatcaacttttggcattctcttccagrttctgatccaggatgaaaatttggaggaaaagtggaagatattaagcaaaatgtttaaagacacaacggaatagacccaaaaagataatttctatctgatttgctttaaaacgtttttttaggatcacaatgatatctttgctgtatttgtatagttmgatgctaaatgctcattgaaacaatcagmtaatttatgtatagattttccagctctcaagttgccmtgggccttcatgctatttaaatatttaagtaatttatgtatttattagtatattactgttatttaacgtttgtctgccaggatgtatggaatgtttcatactcttatgacctgatccatcaggatcagtccctattatgcaaaatgtgaatttaattttatttgtactgacaacttttcaagcaaggctgcaagtacatcagttttatgacaatcaggaagaatgcagtgttctgataccagtgccatcatacacttgtgatggatgggaacgcaagagatacttacatggaaayctgacaatgcaaacctgttgagaagatccaggagaacaagatgctagttcccatgtctgtgaagacttcctggagatggtgttgataaagcaatttagggccacttacacttctaagcaagtttaatctttggatgcctgaattttaaaagggctagaaaaaaatgattgaccagcctgggaaacataacaagaccccgtctctacaaaaaaaatttaaaattagccaggcgtggtggctcatgcttgtggtcccagctgttcaggaggatgaggcaggaggatctcttgagcccaggaggtcaaggctatggtgagccgtgattgtgccactgcataccagcctaggtgacagaatgagaccctgtctcaaaaaaaaaaatgattgaaattaaaattcagctttagcttccatggcagtcctcacccccacctctctaaaagacacaggaggatgacacagaaacaccgtaagtgtctggaaggcaaaaagatcttaagattcaagagagaggacaagtagttatggctaaggacatgaaattgtcagaatggcaggtggcttcttaacagccmtgtgagaagcagacagatgcaaagaaaatctggaatccctttctcattagcatgaatgaacctgatacacaattatgaccagaaaatatggctccatgaaggtgctacttttaagtaatgtatgtgcgctctgtaaagtgattacatttgtttcctgtttgtttatttatttatttatttttgcattctgaggctgaactaataaaaactcttctttgtaatcatattttgggcattctcagctgatttgagtactctgcttgcaagtctaccaggggtgcattttttcccctatcatttaagcattgccctttcttgaagtgatcccattccaaattttgcagagttgctctttccccttatagtatttccaaagtcagtgtcttcctgagctcaggggatgtccctgtaatctgacaaggaaggatcctttgcaagggcactgaactgcattgtgccttttttaggggtrgaagctctcacttattccaccctctatcctggaatcgactctactggtatcccaagaatcatgaaataaaactctaacctggtacagccatggacatctcagctcttaggtccagctctagtatttattgagagtttgccgtatatatggacatgtgctagccctcagggttgggaagtttcaaaaagccttgcattgtgtctcccaaacagtgcccactcctaacactgcttataaggcaggatgaaaagttaacttcactatcattacacgctaaaatgttcaggatatatggtagcctggggtgagaatgaaaaagaaggatctgtgtaacccagcaccatccaggaagactcatcagagaagagagggtgccaactttgggctaaagaatgggcagggcctgcaaattccccttggtgcttcccatggaaggaggagatggtgggatcagagggaatgcagtccaatttcctgctatcccaaaaatccaagtgtgcacattcaggcttccttgcaatggcagggtaattataataggggtgtttgtttacattcctgattttcagtgtcccctggagccctatgccactctgctcctggcctggaggaatggtgggtggcttcygtcattctttgccaacctttggagcatatggtcccgtgttataagcccacacttgacagcatayggttgttaataacaagtgtttgtccccctacagggtctttcatctgcagttaccaaagtacttaacggacatttaatgaacaacactaaccagatttttaaaaaataaataactaatcacatttcataagcactgagaactgggacctttccccaratttctggccagcctggggcagaggtgagatgttctggctcccaccatgcccagtgcttttgcgacatgayctcttagcattcgattaatttcagtgcatgcaatgcagagtttttcttctttaaagatagtctccaggactgtcctttttattgtaaatctasccactacaaaatgtactaaatgtctaagccaaagatcttaggactgggaatcagaggagcagactccagtcccaactatggttacataacagacttgtgaccttgagcagggtgttggaaacagcctgctggttttccaatcaatactcattcccaactgttttctccccgatgccctcttcagctctaaatgttggtaagtttagcgaccactttttcagccacctttgttgcccagcaaagccaaaacactgagttctggccaatgagatataagaaaattctgctgggagggttgctgagaagctttggcttttctgatgaaagacagagccatgtctagcatcaccctttccttccatcctcctctcttgagcagaaaaaaatctcgagaagcttcagaggacaccttgtgcccagtatgaaagccatcatgcaaaaactcaagctagagacttcaggctaggcgctgtggctcatgcctgtaatcccagcactttgggagactgaggtgggcagatcacctaaggtcaggagttcaagaccagcctggtcaacatggtgaaaccccgtctctaccaaaaaagtacaaacattagctgggcatggtggtacactcctataatcccagctacttgggaggctgaggcaggagaatcacttgaacttaggaggcagagtttgcagtaagcagagatcacacaattgcactccagcctgggcaacagagtgagactttgtctcaaaaaaaaaaaaaagaaagaaaaagaaaaagaaaagaaaagaaaaaagccagactccagatcctcatggcatcatggagcagctgaaccaaccactgtatctacctaccccagatttcttgacatgtgagagagacagatccatatttgtttcttttttttattgtggtgaaatattcataacataaaatgtaacattttaaccattttcaggtgtacagttcagtggcattaaatacattcatattgttgtgcaaccatcactccacccatcaccagarctatttaatcagacccccatctatgagaggctgctggccaagtcagaaaaaggacccatgccagcacaggaagaaacctggggtttggtgtcagaaaacctggttctgcccctcacagctggcatgggcctggtgaagacacggagtactcgatttccagagacatcaggtggggctttggtgataccctgcttcgctgacctctgtgaggtgtaaaacaagtgaggacataaacctgcaggccccctcctgaaatcttcaagtgtcatacccttaggagtccgtctccccactcccatgttcaagaagaaagtgagaaaactaagcaccaaaggcagccatagaagctgcctcacgaggtccctaacaaccctgtgcaggaggaattctcatcccattattacagataaggaaactrtggccaaggtccctgttccaagggcagcctgagcatcagcaggactcacctgaaggcggggagagattggggatcccacaggaaagcacctctactgtcctttcattcagtatttttggagtccctggtaccgtctctgtccttggcaccatcctcaactttttggatacaggggtgagtgagcccctgccttcccatggtttctcatctccagaggaccaaatgcttggaattctaagcactggaggccacttcctaaggatcaagggcactattgcatgaaataaataattggtttaatgtgatggtcaccgtgcctggctcacaggaagcactcagtgaatggcagctatgtccactgactagctgtgatcttgaacaagttatttaacatcttcgagcctcagttttctcatccttcaaatggaatgatagtacctacctcatagtgtggttgtgaggatcaaatgaaayaatgttcaaaaattgctttaaaatgtacctgatccaataagtaaaagcttactgtaaagtaaaatgtacctgatctaataactaaaagcttattgttattarttttattgtgctatttagaacctgaaagaagcataattctggaccctgtgcttcttgcaaggtttaggggatgaaggggtggtttttacctggccttggtgtctctgagaaccgggttggcatggaggaatcattaatcagccagtggggatgagaaagctggtccagtctgttagcatatttaaaagcctctccggtgtaaaatccctttcttgtaaataaaatcgccaaaacgtccccacatgggggtatcaagatgccgtgaaccccgttcttgctttcagggcttgtacagcctggtgagaaacagaaaagggaaatggtggtgaatataataaaatataacctggctactagctgagttaaaggtatgtgcaccataaatatttatttttacaaaggtttccatctcccgggaggagccctttcattccctttcaccttctctggatgtaatgaatttggcataatcctaccaattcaccttacctataaatcagactttaatcatctccgtttcatttcagtgtagtccttcttctagggcggcgtttgggagcaaaatatatctggacaagactttctccagagggtcatattataccaaggaaatgaattccctgtctcaagctcataaaccgcaaaaataaagccagcattctggctgaaggcggaggaaaccagacgcgcacacagaaaaccctccttctgcgggaagcgctgggcggagctgatttgcatttaccttcacgcaggcctgggttccgcaggaggcctagagcgttccggcagcgcgcccgcccgcccgccgcggtcgtgcgcagccactcaacccggtggatgctagcgtgtgacgggctgcagggccctgccgctgctcactaagctcccccgtctcctttcataaggagcaccatcccttcacttctatccatcaggctgcttgcaaaaggagctaacccgggcatgtgggattccaaggaactgaacattcckccagtggctctggggtttggtgaagagggaaagtcgagggacaaatcttgggtaagccacagtgttcggtgagcttcctccttcccacgaccaacatacagataggtgtaatgaagttaaaatgccagcaagagaaacaacacctggaaggagtccagagcacaggggtgcgcacttgatcctgaagcaaggctcacacctgggctcaccacttaccagctttttgctcttaggcaattccttatctctttgtgtgtgtgtcctcacctctaaaacaagtatgctaatagtgccaccatctactgggtgctgtgggggttaaatgagtcaaggctcacaggacccagtgctccatcgcccaggctggagtgcagtggcacaatcaaagctcacggcagcttctaacctgcagcctcaaactcctgggctcaagcgattctcccgcctcaccctcccgcgattgtttttctcagagcaggccaacaaggagaggcaatcctaaagcccacttctttttccctccycatgaatatgaaggttgactttggacatgtacagaagccttccagtcctaactcagaaagctatgtccttccagccaccagccctttgctgggcatacagccagcacacagcagtgacatctccctggaatcacagcactcagagcaatgccctatttcagcaaattattgcatgggtttctgctcaaccttgtagaacatcctccagccatggcttgtccatttccctgaaactcctctttattgagtgtttggggtgtttaagggttaaccagcccaatggtcccccaacttgtttgagccagggtccctttgttcaaatggaaatcttaaatgcaattccaagatacacaggaattggggagtatggtggccaaaggggctttagttgcatctgcaacgttctaatttcttacaaggaaaatatatattttttgcataattaaaagttagttttttatgaagtcctatatataaagtaggcaaaagcagagctgctctggctggagcctcacacccactcattccctgtcccctattcaccactgagagccctaaggcctcttctcaacactcctaaattctgcagaacacagttttatagatgacaaaacagaaggacagagtttggtgccgtgcccaaacaccaggattaatgccagggctcaaacttgagcctgggtctcctgactcccattttggcagttcctgttcaaattcccagaagattgccaactaaagatactttcttttcaacttttcattctgaattaatttcagaattagaaaaatatggccaaaatagttcacagaagtcccatattactatcaccgggtttctctaatgttaacataaacttggtatagttatccaaaacagtaaaattaacattgatcaatactactacctaatagatagaccttattcaaattttgctaatttttccaccaatgtgcttttcctcgtccaggatacaatctaagacacaacactgaatttagtttcatgccctataatcacctcaagtctgggaaggttccttggtcttccttaaccaygcattaccttgacacatttgaagagctaggagcagttattttgtaaaatgtccctcaagtgacatttgtctcatgtttcttcatgattaaatttgggttctacatttttgtcaagcatcctacagcagtaatactgtgccct

SEQ ID NO: 9847 - DNA, 105399 bp, Homo sapiens
aatcttaatttccctttttaaaaaaagatagtactctcactgctacgtcacacactgttatattttttaaatgtttgcagatgttaaatcaaagcatgcaccttaatgaatcttttcatctcttgggaaataaaccgtcacatattgtggaaacgcttcctttgaatttctgaaaacatggaacacatactcatattgtatatccacaaaatgcaccaggaattatgcagacgctttttttttttttttttccagacagggtctcactttgttgcccaggctggagtgcagtggcacaaacatggctcactgcagctttgaactctctagctcaaktgatccgcctccctcagcctcctgagtagctgggactatcagtgtgcaccaccacgcctggctaatyttttttttttttttgtagagacagggtctcaytatgttgctcaggctcagactcttttatgtatgtgatcatttaacacttaggaacaagaaatccatcccgttgyactgattcaacatctgagattcagaaattatctgctgttttggaagactacaagatgaaccaggcaatctcttcagtttctgttgtcagggaactttacttagattttctgaaagagccactgagcagttttgagtcatttgcctcttcaagagattgttcctatttcagaggtctttcatttttcctttttgtattttgactagagtttatctgatctaaatacatgttttctcacagaaggcacaaaatgcttcataaggagtcattttgtcctttctttcttctgatgaacctgccctctcctcctctgcaaggtttcacagtgatgtgcaacgtccactctccatgctaagtgacagtgactgtaatttgctgagagagcagtgaccaaaccattggctccttcagaggctggttatttcaaccatctggagaaaaatggaggctcctaatgcagagtgaggaccttaagttgtctagggcaaagactcatttgttcattcattcattaattcacccatgcactcattggacaaacttgaatagggtactatgccccaggggtgtgaggaaggataaactatggagtggcccattcacaacaactgcacatcagggcagagcagaagtgctctaacagcaccagctccaggtcacccaaggatgaccaggaaggctccaggcagatcaagcattcgagctgggcttggaggaatatccttgattctggaggtggagttgggaagcagccatcccagcaaagaacatggcagcagagaagctgaagacaccaggatgaggagtggaccagtcggaatccttactcctggatgtgctgggggacagatggactcctccaaagagctgaatgctgggctgaacagttttagtccttaggagctactgactgttgtcaacagaaggtgacagcgcctaccctggcagctgcccatggggagtgatgagccggggaggaagatcctcaagacagtgaggacagaatgcaatatccctggcgtgttctaggggaaggcagtgaaggctaaaacttgggcaccggcagggagaataggtgggacaggagagccgtggaagacaggatgaagccagaaggagagctggagaaggacctgaggtgggggtgaagatggtgggagtgtcaaggggattctcacatttttatttttaactttaaaaagtttttaaacagaaacaaggtcttgccatcttgcccaggctggtctcgaattcctgggctaaagtgatcctcctgtctcagtctctcaaagtgctgggattacaggcatgagccaccatgcccacctgatcctcacattctttttttttttttttttttctgatacagagtcttgctctgccgcccaggctggagtrcagtggcatgatcttggctcactgcaacctccgcctccgaggttcaagagattctcctgcctcggcctcccaagtagctgggattacaggtgtgcaccaccacacctggctaatttttgtatttttagtagagacagggtttcaccatgttggccaggctgatctggaactcctgaccttgagtgatctgcccacctctgcctcccaaagtgctgggattacaggcatgagccaccatacctgactgattctcagattctgaaatgacagttaagcccrggactcaagccagggacagragcarataacctggttttggtgagaaggttatgcacttgcttctgaaaatgttgatgatgagactaagtctyatagtttcttgtgcacctcccttggtgcctagaagaaaggttaaaacaggatacattacagagggactatcttgagagaggagttacctgggcacagcccagggscccttgggagtgacatgcaagggcagcactggcttgccttatttggttctcccgctctttcttctttcccttgtaaaagtaactgaagcttaaaggtgaaaatgacttaaataatagaaaccatgttagccttactccccttccccattagccacaaattggtggcgatcaccattttgtgcaccgagcctgggtctcacgcttgcaagtccttgggctcatctggagtcagcttcatcagtttgtccacacagagcaggatgagggtgaggaaccagaggctccagccaacagctgccgcgatccagccgtactcgtccactcctgtgcggcagcaccgggctgcttgtgggcagaagtccacgtctggtggggaagggacagcaaggacgacggcatgcaccaccagccctgcccaggcttctctaccattaatattaacagaacaatcacagcacggtagctgacactgatgaggcctactacgtgccatgcactgtgctgcgtgcttttacacgttagcttatgccttcctcacaaagcgacaggtgcgacttttattcccattttacatgaagaaactgaggctgtaatttgcccaagatcacaagatggcagaagaactcaaacgcaagtctgcaggactctgaagccatactcttaacctctatgtattattccctaatacccttccttttttttttttttyctttttgagacagagtctcactctgttgcccaggctggagtgcaatggcatgatctcagctcactgcaacttctgccttctgggttcaagcaattctcctgcctcagcctcccaagtagctgggattacaggcacgcaccaccacacccagctaatkttttgtatttttagtagagactgggttttgccatgttggccaggctggtcttgaactcctggcctcaagtgatccacccacctgggcctcccaaagtgctggtattacaggcatgagccaccacgcccagcctatccttcgttttaagtgcctaagttaatgcattcggtcattcaatgagggcaggataaagggaaccagacaaaataaagtggaactttctcttttttttttgagagggagtctcactgtgttgcccaggctggagtgcagtggtgcaatttcggctcacagcaacctctgcctcccaggttcaagcaattctcctgtctcagcctccctagtagctggcactacaggcgcatgccaccacatccagctaatttttttstatttttaatagagacagggtttcaccatattggtcaggctggtctcaaactcctgaccttaggtgatccacctgcttcatcttccgaaaatgctgggattacaggcatgagccactgcgcccagctgcaaaactttctattagctagacatgcataatagtggttgctctatgaattactgagcgccttgtggctagaagtaggcaagaagaggaaraacgtgcatagaagaagaagaaatatgtatgccaaggacrccaaaaccaagctgttgcattgggtggaagttggactagatgatttcttatggcctttccacctccaarcttcttcaagcatttgaacctagggcattgttagctgctgacctgggatgggtcattaaagcaatctgtgtcaaagattgtgcacctagatggggatcagagccaagaaagcctttcagacctgctctgcaaatagttctgggacaaaccacactggtgcacaggaaggccaggcaggcccttgcccacttgacaccaatcaacggaaagcggggaggcctttgtttccctcccaggctgagggccagttctggggttagagcagttggcaggagaagcttactgaggcactgctccagggtcccagggtctgggtggtgagcggtcaagsttgagctgttgctgctgcttgcttctggaagaaaagataggagatagtctgaggcactggcaaaagctattcccaggcatagattttgaaatgttttttgtaaatcagtagtgagtattatgaaagtattatagaagctccmgcatgggcatattgaggctttctgcaacaaagctaactccctgttatggaccgaattatgttcccctctcccaagtttcatatattgaagtcctaaccccaatgtgattgtatttggagatgggacattcgaagaggcagttaagcttaaatgaggtcctatgggtgggccctaatccaatatggcggggtccttataagatgaggaagaggccaggtgcagtggttcasacctgtaatcccagcattttgggaggccgaggtgggcagatcacctgaggtcaggagttcaagaacagcctggccaacatgatgaaaccctgtctctactaaaaatacaaaagcagccgggcgtggtggtgcatgcctgtaatcccagctacttgggaggctggggcagcagaattgcttgaacccaggaggcggaggttcagtgagctgagatcacaccattgcactccagcctgggtgacgagtgaaactccgtctaaaaaaaaaaaaaaaagaagaagaagaagaagaagaagaaacatcagcaacacacatgcacagagaaaagtccacgtgagaacccagtgagaaggcgtctatttgcaacccaaggagggaggcctcaggagaaatcaaaccatcaacaccttgatcttggacttccagcctccagaatgatggctgtcaaaaaaaattaaacatcatagaagcaagcccagagactgccagaatacgcagcacatagattgattcatgagcaaggagtggaaagataaaaaggactttagcatgaattgttaaagtcctgttgtcttgaggtgtgggattgggttagggatctgaggcatccaggttcctgtccataactgacaataagaagagagatgacctctaagtccatactgttcaatacggcagccactagccacctgtggttgtttaaatttattaaaatcaaattcagtaaaaaaaactcagcttcttgtttacattagacccatgccaagggttccattgccgcgtgtgactagtggctaccatattggaagcaccactcagacatgggacatttccaccctcagtgcaagttctattattagacagtgctcatgctgacctaggtagatggaaaccaagagatggattggaagaaccttcctagaaattatattgctgttcgttctgcttcttggggaatgcaaaaaggaaaaaaaaaaaagtggtgggcatggaaactctcaaggttcccctggctgtgggtcagtgtgtccttcaagggagcttgttgtcacagcaggacgagttcagaagaaacctgctgtttagctaaagccatgaagttgctgctgagactaattttatgccacccaacccccaagccactccaatgtcctgcttaaagtatagtaattgcctcgatgcaatctgttactgtaaattatttacagctaaatggcttagagcctggtctttatttgttttggagaaactgattcctcactattctaattttccttatgactcaaataacttccttggccctgactttcatttcacctctacacctagaatggaagttgtcctcttccaaagtgagtggaaaaaaaccctagttggctgaatgctagggttaggttcgagcttatgaaattgccattgttataggtgaaaattgttcaatatcagcaattttctgtggttcaaatggaatagccccggtgaaaattcctaagaatttaaacatcgccctcctcccttataagcagagccagaagcgagggagggactggccctacttggggctattccacaagaaaagctgctgggaagacccaacgattcagtgcagttaaacttgtcttctgattctgagctcccatcataagcaaggcactgtcggggtaagtagaaagaaactcagcactcttatttggggaggggtgaagttggaaaataaaatgaatgtgcttaccataattgctgacattcactgtgtgtgttctatgggctatttctaagttctttacatgaaattacatcaattcgtcttgacaagcactatgattgtccccatgagataaaggaggaaacttggcatagagaggtaaagtcatttgctcgaggtcgcatagctagtgagtcatggaagctggacctgggttcaggctcagcggctcaagagtgcacgtcttgaacctcaacaccaacacccctggcagtggctacagaagagagtctgaggatgagaggggcagacacaggactttgggggcagggttggttttgggagcaggagtgttgcagggcatagagagtgtggtggtgttctgaggtggctgagaacaagatcaaagccaggagcagaagatggtaaccaagrtccctctgccrtgagttgcagaacccggmmtggcagggcaaggcaggggatgtagatcagccttccagcctccacaggaaaatggggagataacccagcatttccagtgcccggggaggcaggagggtgggagacagtgaatggcagccctcctggcagtcaggttttgtgaaagtcgcagagaaagtacaaggggcagggagggatggaggacttaggaaagggaaggtcagacacaaatgtgcacagggaggattgcaaagcacgacagcccagtggggctgagaaggagccttcaggacacagcggaccaagagatatcattttggtcccctgatgggtgagactccagcaaataactttttcctttctttgtggcaaaggccaagagaggtggctgctcctgccttagctgaggaattgagtatctgatctccgtctcaggccaacctaagaccccccctgccccagccccacctcccaccccctgcctaatccttcagatgagaaagttctgtttcctccttcctttgcgcaggaccaaccctggccaaagaatcttccccctcctccttctttccctcccacctctcttccctccttcyctcccccttcccagcctggccatgaataaagctcataacgctacctgccgagcaagccgagtggagggaggcaaaggccaggctgaggatcagggtggcccgggtggcagcggggaggcgctgcatgctggaggctgtgctgagtgcccggtgcaggtgagccggtcctgcggagttgtgccgagtgcctgctgcaggtgagtcgactcccacctgcaggagctggaaagcaactctgccagaggtgaacttatgctgggtgtttgggggaaacaccatggggtggagcaaaggaaacttggcctgtcacaccttctctcacctctctagaagggaagccaaaccgttggctgaggaaggaagggaggggcaagctrtgcccttctcccctgagcgcaaatattgyccttattgagaaacaaggggaggacaagagagatctgtgtcatgctggttcctgggacatgagtttgctgcctctcccatctgcagktgtagcatggatgctcaattccatttgggccaataytcactgagcacccactatgctgaagttgggagatacctgctgtcgaagtgcsttaattacaaacacgcatcattcaaccccagaaccgtgtttgaggaatggcttgggaggataaagcactgtgggtttcaacagtggaggccacatctgctgatgggatgcttcaagaagaaaatggcatttgaggttgggcatgggggctcaccctgtartcccagcactctgggaggctgaggcaggtggatcacttgaagtcaggagttcaagaccagcctggccaaaatggtgaaaccccatctctaataaaaatacaaaaattagccaggtgtggtggtgcatgcctgtagtcccagccacttgggaagctgaggcaggaaaatcgcytgaacycggaagacagaggttgcagtaagctgagatgctcctgaccctgcattccagcttggccgacagagggagactccatctccaaaaaaaaaaaaaaraaaraaaagaaaatggcatttggcctgggccttgaaggatggctagaattttgacagggggagaggggaagatggcattataggtagagggacagatgagcaaargtccagaggtaaggaagtgtcagagggtggctgtaccagcagcacccagaagygcaggtgagccaaggcakgtgaggtggggaggcaagaggagagctgtgggctaagcttctgcgtgcctggtagaggaatttgaaacaaagtcaggaagcaaaggggaaggttctgtagagattttgagctgaggagtaacttgactagagctctgcattccgtctaaaacatttattgaagacccacatgtatataaaaggtctcatcctaggcactggagactgagatgactgagacacgcctcttccccttgagagcacagtgcagcagggaaccaaacccggaagaaagaaatttgatgcaacctggcaagactcaaataggggtaccttccactgtgatgggaataaaaaggaggatgggatgaactctgcctgagaggtataggggaaggattcacagagaaagtgacatttgggctgggtgctgaagtttgwgtgcagattagagttgatgggcttttcaagtcaaaggaatagcacctataaaggcgagggaatcgtctgtgtgcacacagcctgccatgtgtggaagtgttcctgcgcatgaatgggcctggtaagggtgaggggtggactccagctctgtgkaaagacatagaaggcgtgagtaagccccaaggaaagatttcctagtggagtgtaacagcccaggggaggcacttttttctaattggctctaagatataaaatagtggtggcctatgttcctggatttggggatagggccaacgtgccctaggaagggtgattttcagtcagtgcacagaagtccagtttaggcattaccactagttgaacattaaacagttgcatgccaggccaggctctcggtgtggggacctgggggtgagaaagaccacacagcccttgtgctcaaggaactcaaggtccccacagagaggacgctgcttagtagaacaaatgctgtcctcgatgttttcctcacaagtaaaccctgcagtgggcttcacagggcaggactgatttatccaatgggtactagggataacagcggtacgtggaatccccaagatttccaaggatctcaaaaatgtttgagacctgagaaaatattctcagatccaaaatttgaagaacagaccaggcatattggcacacgcctgtcatcccaacactttgggaggccgaggtgggaagatcacttgagccagggagttcaagaccagcctgcacaacatagtaagaccctgcctccgcaaaacaaacaaaaaaaaacacaaaaaaattacttgggtatggtagtgtgcacctgtagtctcagctactcaggaggctgaggtgggaggatcacttgagcccaggaggttgaggctgcagtgagctgagatggcaccactgcactccagcctgggtgacacagtragaccctgtccccaaacaaacaaacaaaaatttgaacaatcaaaaactgggcaaaataaatgattgtttcaaaagcaaagttatacagttcacttgaaatgtttaaacggaaacgatttaatgtgggacgctgggtgcattttaatgtgtttgacgtgagcagagcctgtccctcctatggaatcggaacctgaggtatgcaaacatgtaagatggcctgcctggggttattgtagtggtggattgaacagcatctgcagcctaagctgagaccatcctatcaagtcgtatcagggaaagcttttctggcaagcagtggatgtggaggagggggataatgtgttggccctccctccctattttatcattgttatgtgatgtcggactgttttagatgagctgtttgtaggacaaacattctcctatctacagatggaagaactttgttattcgaaaatagtataggctgggccaggcacggtggctcaggcctgtaatcccagcactttgggaaactgaggcaggtggctcatttgaggtcaggagttcgagaccagcctggctaacatggtgaaatcccatctctactaaaaaaattcagaaatattagccaggcgtggtggtgcatgcctgtaatcccggctacttgggaggctgaggcaggagaatcacttgaactggggaggtggaggttatagtgaaccgtgattgtgccactgcactccagcctgggcaacagagtgagactctgtctcaaaaaaaaaaawaaaaaatagggtgggctggactggccaatgataactattaaccccaaagaaagggctgtgtgtgtgtggccactttttactttacgagtgtcaccagtatttgctgtttgtagcaggtctacaactaacaactccatgtggcccrtttcctcactcatacattttgcatcaggtttactttggagcgcatatcaggaagttgccttactcaaagctagactttctcaagactttttttttttttaaatgggtgagataggtatttggttacacayactattttaaaagttcaggctgaaatgtctgtggctaggcaccatggtggtggttggagagaggrgtagccaagagagtgggattccagggctcttactgcttccaatttcacctgttatccctgataagatttcatgtgaaaaagaaaagaagtaggcagagagtttccagggctaaaagatggaaaacctgcagtctgtggcctggaacggcccagggaagaatatttcatgttaatgaagcttctcttgtgattctgataggccccgttgccacctgtccatctcggggaaaagacctctcaccttgaacttgggtttttcatctccagttaacccaaaatctattcagaggagaattgtggccctaaccaagcctgtgcctgccaagccccagctccctcacagagatggggttgatggctcttcttgctcctggctctgtcaggatctgtttttacaaaataatgtcaggctctgggtggttgtgggaccgaaacatctagatgtggacctgagcagcacttagtttgtggaggagttaacctcactccctgcccttcagtgatgggtctgtaatttggagagaacaagaggttcccttttaggaaaccttgagaactacagctgttaagatcatgccatagagttagttgatcaaagtaagaaagtcagcaaggaagtcctggagtccaccatttggaataatttttgaacacttcccaggatgactaatttagcttgttcaaaattgcactgggaggcggtgcagctatggtccagacacgcggaggttaacacaaaggaggtccttcctcttggcgaaaacaaccttccacctaggtcctgtatcttattccctcccatcttctctgaagtatatttcttaatttccaaacatacggaggttttctagttatctttttgttattgatttgtagcttagttgcactgtgacctgcgaatatactttgatgatttctattttttgatgttagttaaaagacaccatatgaccaatttttgtggctcttgaatgtgtcatgcagttgtggggtcagtgctccgggtaagtccattagatcaagagtgctaattrtgtggttcagaacatccrtatttttcctgtcttttaaaatttggtctaattattctgttgaatacagagatgattgcgggtttctttcttccctgtagttttgtcaacttttgcattcaatatttgaggctgtaattgaggtacaaacraatacggaattttgacaacttcctggcaaattgaaccttcttttaaaaaatcattgtgtaatatccctcatctcttttatatttttgagatggagtctctctctgtcgcccaggctggaatgcagtggcacgatctcggctcactgcaacttccacctcccgggtccaagcgattcttcttcctcagtctcctgagtagctgggattacaggcgtgtgccaccacccccgggtaatttttgtatttttggtagaaacaggggtttcaccatgttggccaggctggtcttgaaatcctgacctcaggtgagactcccgtctcagcctcccaaagtgctgggattacaggtgtgagccactgcgcccagccttctttatctctagtaatgtttttttgccataaactttactttgtctgatattgctrtagctataacaggtttcttttgttttgtttggcatgctaaatcattttcccatcatattactttcaacttttctaaaaccctgttcaagatgggaggatttcttgagcccaggactgtgagaccagcctgggcaacatagtgaaactctgttgctacaaaaaaaaaaaaaaaaacaaacctgagtttggtgatgcaagcctgtggtcccagctactcaggaggctgagataggaggattgcttgagcccaggagatccgagatggcagggagccatgatggagtcactacactccagactgggtgacagagtgagaccctgtctctaaaatttaaaaacaaacaaatcaatctatcagcttaccaagtgctctctactcttcccatctagcttatgttccttttctctttcttctcactacttttggattgagttgttgggttattccattttgtagagattacgacatgcattccttttttgttgctttttaagattattttattctgcaacccaggagcatagatccaagttaccctgaatatatgttctcacaagtgcattcttaacatatcaaagtctaatattaattgacactttcaccactttcatagataatatgaagamctcagaactttaactccatttacccactcgcccaggctggagtgcagtggcgctatctcrgctcactgcaagctgcctcctgggttcacgccattctcctgcctcagcctccygagtagctgggactacaggtgcccgccaccaygcccagctaagtttttgtatttttagtagagatggggtttcacygtgttagccaggatgrtctcgatctcctgacctcgtgatctrcccacctcggcctcccaaagtgctgggattacaggcgtgagccaccacacctggcctatccactcctgatttttataccattgtagtcatgtatgttagttatacacatagtttttaactcaataagtcattattattattattttccaagtgaatatatgagtgaaatttattaaatttatttacatgtttaccggtttattgttcttaatttatttctgcatgtctgrtcttccatctgtgatcattttccttctctttgaagaataccatttagtattccctcagtggagtgattaacatgttactttgtttgtctggatatgtttttattcttccttcattcttggaaatcaccttcattgggtacaaaatgtaaggttggcagatattttctttcagtgctttaaagataacatttcatttcttttggctaccattgtttctgttgagaactgtccacctcactggggcttcattgcagataatttgcctcttttattttttggctgtttttaaatttttctttgcctttggttttcagcagttttactctgatgtgctgaagtatggattccttttttgtcctctttggagtttgtaggcaattggatatggagcttgatgttattaataagttttgaaaacttctcagccatcaaatactacttgtgaaccattctctcctctctttttgtgactgattacacataggttagatctttccactccatcctgtaattctcttaccttcttctttattctttatctttttgttttcctgtgttttactctggatattgccttttgcccartcttttatgaaatctcttgtcatctgtgtctaatcctcttttataactacccattgggttcttaatttygattatcttagttttagttccagaatttccattctgttcttttttatatttttttttctgccaaactattcagtcctgtttttcatcttcataaacagaggggatataattcctttaaaatccgtgtctgataacctcagtcttygccattcttttcccattcgtttatttccattgtctattatttctgctgttttcattcatatgatcatgtttctttgcatacctggttattttttattgtgggcaaaattgcaattacatactattgtttatagaaataacttgagacccaggataatgctttcttcctgtagacatgatttttgttgttgttgctttaatcgagtgcttgggggcaacacaaatctgctatcatgtcattccggtctcaggaattgagacratgtgtgtcagtttattttggatacctttccttctatggtgtagccctttagaaatttcatccccaaggaaataaccaaagatgagcacaaaaatgcatatccaaagttctccatctcaatattacaatgtttgtaaaagtgaaagcttggaagcagtttataatgaaataaagggtagctattaaaaccgtttttgggactgggtatggtggctcacacctaaaatcccagcattttggaaggccaaggtgggctgatcacctgaggtcaggagtttgagaccagcctggccaacatggcaaaaccccatctctactaaaaatacaaaaattagccagtcctggtggtatgtgcctgtaatcccagctactcaggagactggaggcaagagaatcgcttgaacccaagaggcagaggttgcagtgagccaagatcatgccactactctccagcctgggttacagagcaagactctatctcaaaaaaacaacagcaacagcagcaacaaaaaacattcttgggtaccatttaatcacttgggaaaacatttgccatagtatacaaaacagaaaagcaggatataaatctttatgtcaatataattccagttttgtaatatatacacatatacaatgaaaaatgtttggaatgaatcctctcaaaatgttagtagtagtcatatctaggatgtacagttttgggtggttttaattttgtttttaatacttttttgtgtttccattttaaaataatgaatgtgtatattatttttatgatcaagaaataaaatcaagttaatacttttttttttttttttttttttgagacagagtcttgctctgtcacccaggctggagtgcagttgtgcaatctaggctcacygcaacatctgcctcccrggttcaagyrattctagtgtctcagcctcccgagtagctgggatyacaggcatgtaccaccatgcccagctaattttgtatttttagtagagacagagttctccatgttggtcaggctggtctcaaactcccaacctcaggtgatccacctgcctcagcctctcaaagtgctgggattacaggcgtgagccactgcacctggcctaagttaatacattcttaaagattatttcacaggaaagcaatacagtcacaatgaagcagacagattttacatatctgtcccattacctgggaaaaatgttcaatatcagggaatcttcttttccattaaaaaaacaagctggccaggcatggtggctcacgcctgtaatcctagcactttgggaggctgaggtgggtggatcacttgaggtcaggagttcaagaccagcctggccaatatggtaaaaccccatctctactaaaaatacaaaaactaggcaggcgtgatggtgggcacctgtaatcccagctactcgggagggtgaggcagaagaattgcttgaacccaggaggcagagtttgcagtgagccgagawtgcaccactgcactccagcctgggcaacagagcgagactctgtctcaaaaaraaaaaaagacaaaaacaacaacaacaacaaaaaaaaaaaccmmaaaaaaaccttaacctttaagtttcacatggtgcagattactgcctatcayagcctcagctcttggagtgctcrtggtcacaayggaatgtacagacatatccacggatggtcaggacacaaagaagactagaaagaagacacagatataacatcggattacaattagaatctcagtgttggaaaaggacctcagagaccatccgggccaatctttaaccttggaagaatgccctctgarttaatctgttctcacgctgctaataaagacatatccaaggctgggtaatttgtaaagaaaagaggtttamtgaactcacagttccacatggctggggaggactcacaatcatggcagaaggcaaaggagaagcaaaggcacatcttacatggtggcaggcaagaaagcgtgtgaaggggaactcccatttataaaaccatcagatcttgtgagactcatttcctatcatgagaacagcacaggaaagacctgcccccatgattcaattacctcccactgagtccctcccacaacaagtgggaattatgggagctacarttcaagatgagatttgggtggggacacagccaaaccatatgactttcctataaggaaagtaggatattatagagtttggtatagctgcatttgacctgtcctgcttcttaaggttgttagttggacttctgcttaaatgcctcaagggattggtttcttactaatttttaagacagccagctcttctgtgggttagctcgggtagaaaagtttgtgagttactgkcatcaaacaagtaagggcattttaaggtgaagttaataaacagttggaaggagggcttttcagctctcaactctatgattggcaatttctggttccctacaattactcttatcatttgtgcaaaatatttctgttggcacaacaatctgagcatgtggtcagattcatcttttgtttaataaacagagagatttgttctcaaagagtaactttaagctaaagtttttggaaataagctgcaggtttgtaataaatattccgccaatttttcttctccagttttgttcacataaaaccgaagcgaaccagatagtcaagtcaatgattgtttggacctgtcttcccaacatccaaagacccctctctcactgtgttttctggccttttctataacttcccttcattctctttctctttttttctttttccgtttttaagacagaatctcactctattgcccagggtggagtgcagtggtgcratcacaactcactgtagcctccacctcctagggctcaagccatcctcctgcctcagcctcctgagtagctgggactacaggcatgtaccaccacacccagctaatattttttatttttagtagagttgaggtcttgctctgttaccsaggctagtctcaaactcctgggctcaagygatccttcckcctcagtctctggaaatgctgggattacaggtgtgagtcactgctcctggcctcttttttcttttttgaaaatgctttgtccatatgtttcattttatttatgtatttatttagagacagggtgttgcctaggttggagtacagtggctattcgcaggtgcaatcacagtgtattacagcctcgaactcctgggctccagtratcctcccacctcagcctccttagtagctcgggctacaggtatgcaccaccatgcctagctcctcatcttctcttgtccaagctgcctctaggttkgttggttgggaacacaagaatcytgagtcaagagtcctggattccagttttcatgttgtcacttggagtgtgaccttggaggagtcatgtaaccttggtgtcgatgcgactttctagaaggggaacacgaggggaaaaatctgggggaattatgccttccatcctttgtggggagaattttctctggggtccgcaggactctgcagaggggatacgtgatgcccagaaagggttttgctatgtatacttcctaacacaaaggggtgttaagtcctgtgagaaacaactggaaagctaccgtgatggcatgaaaagaccctgaagtgcagagccctgggttctgcttccagctctgccgccaattacctgcaggaccttgagcaaattgcatctgctccctggagttctgttttctcatctctaaagtaaggagactgaatcaggtgatctcgaagtttcttccagtgatagatttctatgactctgtagtcaatgcaggatattaaatggagaaagaagagaaacaagatagtacatttaaattctttttttttcttttttagaaagtggaggtggaaatcatgataagaaacttacttgtgtaattgggagtaaatattattatagaaaaggcagataactagggaggtgctcccaagtgaaaaacttaggctagcgccgggtgtggtggctcatgcctgtaatcccagcattttgggaggctgaggtgggagggctgcttgagcccaggastttgagaccagcctgggcaacatagggagaatctctctctctcaatctgtctctctctctctccttaggctataggtaaaaaaatccatccatgataaacttcagggcattctgttgtctctcttttttttttttcctgagacaaggtctcactctgtcacccaggctggagtgcagtggtgcaatcttcgttcactgcagcrtcgacctccctggctcaagcgatcctcccacctcagcctcctgagtagctgggactagagatgcatgccacgaaggccagctaagtttattttgtgtagagacagaggcttgctatgttgcccaggatggtttcagactcctgggctcaagcaatcctcccacctcggcctcccacagtgttgggattataggcatgagccattgtgcccagcccattctgttctctttatgataaaacttcattttcctaagtctcatttccagttcctccatgacgtggcaagtgaagacaggaatgaaaggaatgtaaagcagcttttctctgaagagaagaagagagagagacasagccaaggtacgctgaggtggagaagagggaagctggagggctcygtggtggaggaggwtcttctcctaaggaatgaggtggtcgtgtgctgaggggtgtggggaggagtggagagtagaggagagtggagctgtctgagagccactgggagggctcagtgtcctaggacgtgatctagaggacagaaagtggtagaacagcagggagtgccccactggcgttggatggcagcagtgagcactgagacacattcctggaaaaagtcgtggccaggaggaagtggaaatgtgcatggcagggatgatcctggttccagcatccgtagatttgatctcagtgtgctgattcatgaactcttggaccttactatcaatgaattgcattcagttgcacatgggtgtgtttgtgtgtgtgtgtgtgcgtgtgtgtgcatacaatggaggaagttgaattcattctctcttttttttagcaacctcaaatcattcttttctgtctcaaacactttgtttatgagtgcatattgtaaagggtggtgggtggcagagtcagtgcctggccaacagtgaagaagtattcagcttggctgggtgcagtggctcatgcctattataatcccagtactttggaaggccgaggcaggtggattgcttgaggtcaggggttcaagaccagcctggccaacatggtgaaaccctgtctccactaaaaatacaaaaaattamccgggcgtggtggtgcacacctgtagtcctagctactcaagaggctgaggcaggagaatcacttgaatccaggaggtggaggttgcagtgagctgagatcacgacactacactccagactgggcgacagagcaagactccactcaaaaaaaaaaaaaaaagaaaaaagaaagtgagaagtattcagtttgagtggatgataaaatcagttatttgaatgaaggctatctggagggaattcagttcagaaaaatcagatgctctttttagaaaagtcagattgttacttttccagctagattattatttttggattaaattccttgcaaacattttagctggctctgtatttatcctttgtcattttctaaattacaatgatctcctcctgtaaattgatcttgtacactgaacatgtgattgtgtgcaatattttcctaatcctgggtacaaggatatgagaacacaggaagccctgtgttaaaggaatgcccgttttaaaggcacgtaagtggaatgctcatctcttcaccctcaagagccattctgtagaaagtcctcarggcatgaaagtgctttgccrgggacctttgaggctaagtgtaaagcttttggaactggcartgtgccccagacttgtctaaagaatgggaacagtggcctgaaacaccaaatgtcaaaagcaatgtttgtttggataatatagaggattgattctgccctaagaaagttgtttctctcaagaccgaatgctgaatttaaatattattttccttcaaagttttgagttgactttgagagtatataaaaatattatgtttaggccaggcgcagtggctcacgcctataatcccagcactttgggaggctgaggagggtggatcatgaggtcaggagatcgagaccaccctggctaacacggtgaaacaccatctctactaaaaatacaaaaaactagctgggtgtggtggtgggtgtctgtagtcccagctactcgggaggctgagtcaggagaatggcgtgaacccaggagacggagcttgcagtgagccaagatcgcgccactgcaccccagcctatgtgacagagtgagactccatctcaaaaaaaaaaaaaaatacatatatatatatgtgtgtgtgtgtgtgtgtgtgtgtgtatatatatgtatatatatatatatatataatgtttaaggattcataggtggattagtttctttttaaaaaattcaatggcacaaataattagagaaataaggctgtattatctggctttgggcaagtcacttagcctcactgtgccttacttttctgcaagagtggattggactagatcatctatatcttacctgccaatggrcacccttttgggggctagagctgtgtttggttcttctctcctcctttccttcttcctttactcttgaggttcacagtagggaacttagaaaatttactctgattttggacaaattggactgtgtttgctaatgcttggcctgtttcaactttccaagaatcagcaatgctatgaaatgttgcacataaaaaaattgagctcagacaggaaacttctrgagaaatgtcaaagatgtcatggttcaaagagattgtctcagatatacatyatgggtaagaaaaagtaggagttcccattttaaaagttatttttttgagacagggtcttactcttgycaccttggctggagtgcagtggtacaatcatggctcactgyggccttgcactcccgagctcaagtgattctcccacctcagcctcctgagtagctgggactacaagtgtgcaccactctgcctggctaatttttaaatttttcgtagagatgatttctcactatgctgcccatgctggtctgaaactcctgggctcaagcgatcctcctgcttcagcctcctaaagtgatggaattcagacatgagccatgtgcctggcctcatttttaaaatttttaattaaaaaaawtttttttaaatagagacagggtcttgctatgttrcccagactggtcttgatctcctggcctcaagcaatactcccacctcggtcccccatagtgctgaggttataggtgtgagccaccgtacgcagccatggttcccattttctagatgtatctcccaactagaactcacagaatttggggaggggaagttatcaactgtctcttctcctgaaaataaataaataaaaccctctcctggtgctccatttcctctttagctgctgccctgctccctcctttctcttcacagttggtgtttttaaaagaaagctgtagttgatttctgtgcccatcttttttttggaatggagtcttgctctgtcccccaggctgcagtgcagtggtgcaatctcggctcactgcaacctccgcctctygggttcaagcaattctccttcctcagcctcccgagtagctgggattacaggcatctgctaccacgcccagctaatttttgtatttttagtagagaaggggtttcactatgttggccagactggtcttgaactcctgacctcaggcgatccaactgcctcggcctcccaaaatgctgggattacaggygtgagccaccatgcccagccaatttccatgcccatcttttcttcaccagccactgactttctctgagtccccagaatcctgcccatttcactccattgaagtggatccacggggtccccagtaacctccagatctttctcagccctccccttcatgaacactccatgattctcaagacattttcttcttttgagttctcattcttctgattatcctcctccctctgtttcttgtttgtctcctctgtgcagccttgaaatcctggaatttctctgtattcaggcttggacctccactgcctctccctcrttatgggttgaagtgtgctgccccattccattcatatgttgtagttctaatccggaggatctgagaatgtggctgtatttggaaacagggtctttgccgagataattarttaagatgagtttatagcagagtggggtgggcccctaatccaatatgattggtgtccttataaaaagggatttggacacagacacacacatgtgaakgtgaaggcatagattggagtgatgcttctccaagccaaggaatgccaaagattgccagcaaccaccagcagccaagtaagagacctggaagattcttcctcacagccttcagagggaaccagccttgcgtggcatcttgatttcagacttctaactttcagggctgagataatacatttctgttggttaagccacccagtttatggcactctggtaccacagtcctaggaaactcatacacccaattctgcggtccccaggctagtggttgtccaatgtttttgtctcaggtcctctttacactgttaagaattattggggtycaggtgcagtggctcatacctgtaatcccagcactttgggaggccaaggtgggagaattgcttgaggccaggagtttgagacaagccttggcaacactgtgagacccaaactctacaaaaaaaaaaaaaaagagagagagagacagagaaaaatttctttaaaaaaaattgctgagaagattaggaacaaggcaaggacattsttcctcaccactccatttcacatcatactggagtcctaactaatgccataagaaaaagaaatgaaaaccatactgattaggaaggaagacataaaattttattcacagatgacttcattgcctgtatagaaaatctgaaagaggctgggcgcggtggctcacacctgtaatcccagcactttgggaggccagggtgggtggatcacgaggttaggagttcaagaccagcctggccaagatggtgaaaccccgtgtctactaaaagtacaaaataattagccaggcrtggtggcaggtgcttgtaatcccagctacttgggaggctgaggcagagaattgtttgaacccaggaggtrgaggctgcagcgagccaagattgcaccactgcactccagccttggtgataagagcaagactcgtctacaaaaaaagaaaaagaaaaaaaaaaagaaaatctgaaagaatcaaccaaaaaaagctttcctggaattaagtttttgtataacaaatccctttttctccatacctgttcataaggaccagcaggagcagggtgcttttagctggcaaggccagcagtacaccttcacggtcctacctcaggggaatatcaactctctagccttgtgtcataatttagtttgcaaggatcttaatcatctctcctgtctataaaatatcacagtggtctattacactgatgacaatatactgattggacctagtgagcaagaataacaactattgtagacttattgataagacatttggatgtcagagggtgggaaataaatcagacaaaaatttaggggccttctctctcagtgaaatttcttttttttaattttttttttattttttctttttgaggcaaagtctggctctttcacccaggctggagtgcagaggcatgatctcggatcatagcagtctcaacctcctgggatcaagtgatcctctcacctcagctttcaagtagctggaagcacaggcatgyaccaccacgcccagctaatttttgtttatttttcatagagatgaggcctcactatgttgcccaggttggtctcaaactctctttccccagccatccctgacattgcctaatgggctcatgaacaaagtggctatggtggcagggatggaggttgtgcgtgggctcagcaacatggacttccactcaccaaggccaacctggctgttgccactgctgagtgcccaatctgccagcagcagagatcaacactgagccctcaagatggcactattccctggggtgatccgccagctatggtactggggggtccatagactggtaccagtccatggcctgttaggaactgggccacatagctggaggggagtaggcatttccacctgagcctccacctcctgtcgtgtcagcagcaccattagatcctcagaggagcatgaaccctactgtgaactgtgcatgagaagaatctaggttgtgtgttccttacaaatctgatgcctggtgatctgagatggaacagtttcatgcccaaaccatctcccaacctccattcgtggaaaaactgtcttccacaaaacaggtctctgatgccaaaaaggttggggattgctgctttactgcatctcttaatatgaccctgctctataattagggtcaatgggaaactgcaacaacacaacccaggcagaactacaaatggcccacactcttcaggaatgaaaatttgggtcactcyaccaggtaaagaaccacaaccagctgaggtgcttgctgaaggtaaagggaacatagaacaggtattctgtagtgtaggtagttataaatactggatacaaccacatcaccagctccagaaacaaggactatcattgtcaatcagtatcttttcctttattttttatgaacacacttgtgcatatatatactcatattaagcaaatatctgttttctctcttttcctyttatcatgagacataaaatgtattgattttatatcagtatttaactattgttaattttacatcatagtaatgaagttatggggtatcaggagaagagtatacaccactcaagcagtttacctcctcttctggggaagagattagtgcattttcagtcgtatcatgttgggtagaattatgaccctgtcattgtctttatttggagattaagtgtggtttaagagttgcacataggtgccaagttgacaagggttggacttggaaaggttaattttatggtcaacttgagtgagccaagtgatgtccacatagctggtaaaacattgtttctggatgtrcctgtgggggtatttcttgaatagattagcatttgaatgggtagactgagtaaagaagacagatattccatctatatgtctatccttccaccaatattacaatcttttattttttwwtttttttttaagatagggtctcactttgtcacccaggctggagtgcagtggcatgatcatggctcactgcagcctcgacctccccaggctcaggtcatcctcccaagtcggcctcccaagtagctgggatcacaggcacacaccacaaacctggctaatatttttattattatyatttgtagagatgatagtctcactgtgttgcccaggctggtctgaaactcctgggctcaagcaatccacctgtcttggcctcccaaaatgctgggattataggctcaagccatcgctcctggcccaataccacagtcttgattactggtgctgtacagtaagtcttgaagttgggtagagcgtttctcccacttcattcttctmttcacgagatctctgctgctaccaccggggctggaggagcagagatgcctcattactgctctgcatgtgatcttcaccatcaatgatcgggggaggggagcttattaccaatggatgggggtaaaagttctgattaggtttcttctgacacccccracaggggcaaacaagggagccttgttaccacagagtggggctgaattcagactccccactcggcctggaagtctaggctccccacttgggctttgctggcaatggggtggggggcagggccatagttttttctgtggcgtttaactggattcgcgygattattgtctgaaagttttctttcttggcagactgcccctttcctggtccttttgctagagcgagcaggctttctttggaacttttctgctgcacatgtactggcttctgccgcactgagtccggaatatacagattgattatctgtcccttatctgaaatgctcagaccagaagtgttttagatttcagactttttcagattttggaatatttgcatatatatatatatatataaaatgagatgtcttggggatgggacccaagtctaaacacaaaagtcatgcatgattttttttttgtttttgagacagtctcactctgttgcccaggctggagtgcagtggcgcgatcttggctcactgcaacctttgcctcctgggttcaagcgattctcctgcctcagcctcttgtgtagctgggactacaggcacccaccaccacgccccgctaatttttttgtatttttagtaaagatggtgtttcaccacgttggccaggcttgtctcgaattcctgacctcaagtaatctgcctgccttggcctcccaaagtgctgggattacaggcatgacccaccgtgcccagcctcatgtatgttcatatataccttacacacatagcatgaaggtaattttatttttcccttgaggactctgaatgaaatatgtgttgtgtgcctgagttttgattgcgacctgtcacatgaagtcagcgaaattttccacttgtggtgtcaygttggtgctcggagtttgggattttggagtatttccgattttgaattttcagattagggatactcaacctgtaggaagtaacaagaaaacccagagaactcacctctgtgttgtttcttgcatcttctgattctcagagggtctatcttctgtccagctttcacagtctgcttatgtttgctgtatatatactgtacagggtttttatttttactggttgggaagaaaaagtatttctactccctttttccagatgcagaagccaaagtaatatatatgtgtgtgtgtgtgtgtgtgtgtgtgtgtgkattttttttttttttttgagacggagtttccctctctttgcccaggctggggtgcaatggcacgatcttggctctccacaacctcctccttccgggttcagctattctcctgcctcagcctcttgagtagctgggattacaggcatgcgccaccaagcccagctaattttttgtatttttagtagagatggggtttcaccatgttggccaggctggtcttgaactcctgacctcaggtgatccacccacctcagcctcccaaagtgctgggatgacaggcgtgagccaccgcgcccggccataatatttttaaaaatgtgaaccaggtcatgccatttccctgcttaaaatttcccaagggcttcccaatgctattagaataaaattcaaattccttattggcccagcagacttggggcatggcttggcccctgcctcctactctgacataccatacacatactttttttgttgtttttttttttgagacggagtctcgctgtgtcttttaggctggagtgctgtggtgcgatctcggctcactgcaacctccacttcccgggttcaagcgattctcgtgcctcagcctcctgagtagctgggattacaggcacacgccaccacacctggctaaatttgtattattagtggagaggggagttttcaccatgttggccaggctggtctcgaactcctggcctcaaagtgatcctcctgcctcaggctcccaaactgctgggattacaggcgtgagccaccgcgtccagcctatacttccactttctaagtaagcctcttctgtttttcagataaggtcactgaggccctgaggttaaatagctttcccaaggtcacgcatggtaaatggcagagctgggatcctgactccagtagttgggctggagcctctgctcttaaccattaggtacrtgtactcttttctccacatgttcctgagtggtttctgagcacccagacgtttgaaaactatggccccacccgctgactgggagacaaagcaaacacctgccttggggaagagcargatgagaggtaggagggtgaagtggagagtggagggaggcacgaattgaggccagggctcctagtgcctctggagctcatatgaagggagaggtagaatcaacacagttcttatcttcctgctcttctttgcaaatcttgagttcagcctttggaacttcatccaggtgtctggattcttggacagatctgccctggcaggatgggtgggtgcagctgagctccgcctctcaagaaacgcaagcaactcctttcctccagggtacagagcaggtgctctctcagagggctgggcctccactgccccaggttcacaatcgctgcctcagcttagctgattttcccaaaccgcctacagctcctccctgctgcttcccagcctaaagtttgatttctcaccctgtgttctctaaacaatcgttctaatttgatcatgcacaagtatcacctgaggagcttattaaaaatgcaagtcttggccaggcatggtggttcatacctgtaatcccagcactttgggaagcagaggtgggaggattacttgtaggctaggagttggaggccagcctgggcaacatagtgataccctgtctttatgttgtcatattttataaaaattaaaataaaaaaatcagccaatggctgagcacggtggctcacgcctgtaatcccagcactttgggaggctgaggcaggtggatcacaaggtcaggagatcgagaccatcctggctaacccggtgaaaccccgtctctactaaaaatacaaaaaattagctgggcgtggtggcgggcgcctatagtcccagctacttgggaggctgaggcaggagaatggcgtgaacccaggaggcagagcttgcagtgagccgagatcgcgccactgcactccagcctgggcgacagagcgagagactgtctcaaaaaaaaaaaaaaaaaaaaatcagcccaatcatagtgatgcacacctgtagtcctagctactcaggaggctgaggtgggaggatcacttgagcccaggaggttgaggctgcagtgagctgtgtttgcgccaccacactccagcctggacaacagagcaagaccctgtctcttaaaaaaaaatgcaaatcacagacaatctaggaaacttgaatcctagaattaaggcaaatttaagaattattgaattttaggagtgactggtattttatgtgtgtttgtgtgtgtatatgtgcgtataaaagaatccttatcttttagagatacctgctggaatattttgaaagaaataatatgatgtatgggatttgcttccaaataatcagaggtggggaggggaagtgggtggggtgtggatgatagaacattcatgaactggtgtggccaagtaatgtgtacgtaggggttccctgtactatttgctgtacttttgcagaaaagtacagaaaagttaaaaaaaagcacccccctcactcattctggggtaccttctaaggccactggtggggagagtccctgtgggggatctgtgcaccaccctggagaagcaaagctcattcaaacaaacgcaggtggctgttgcagccccgcacccctgggcaagagaaatgcacctaattggcttgttctgcccctcgcaccctctgtcaaagaaataggaaaagacaagacccctccaaaggaaaagggcacatatcacatatgcttctgtctctttttacctgggccacagcggaagctgaatttcagccattgggcatttcataaggagtcttctattttcctttgaaagtagagtgttttggttaatagttgataggatggtgagtgtgatattttttattttccaaaactattttaattttttcatttatatatgtatatacacacatatatacacacgtatatacatatgtatatatactatatataatgtatataatatataatatatamtrtatataatgtatataatatataatatataatgtatataatrtatataatrtatatwatatawtrtatatatagatatatatatttatttatttatttttgagatggagtctggctctrttgcccaggctggagtgcagtggcgtgatctaggctcactgcaacctctgcttcctgggttcaagcgattctcctgcctcagcctcctgagtagctgggattacaggcacccgccaccacactctgctcattttttcgtatttttagtagagacaggatttcaccatgttggccaggctagtctcaaactcctgacctcaaatgatccgcccacctcagcctcccaaagtgctggaattaccggcgtgagccacggcgcccggcccccaaaattatttttcaaagttattttgtttttacaagttcaagggatgttttggtttactggggtccttctaaggcctccaggaatcttgtcctcaaccttcagctccctgaggggcaagttactttcattagaaaataaatgaatgcttcctgctgggaacttaaggtcatggcagagggcacaggtggggcgggggctgagcaggctggccggtggggcaggtttgtcttcacccacaacaggccagtgttgatacaacagagctgcctcctggctctttgggagcctgggaggagaaggagccgggaggggcgctgcggggaagccacctgcggattcactggctgctgctccgcccaggactgctagcaagcacggagggctgccagacctggggctccctgctccgtgcgtcaggttggggaaaccaccgtctgccccagaccctgacccaggacccgcctggaggaagctggggtaagaagggtgttgatgctgtgcttttgatmtgcataaagtgaatgccttgggtctctggtctatgttcacttggctgtagttactagacagggcagtaggagagctttgaattcatcttggtgtcaaaaggcacaaatgtgggcccagaccatgtgcacttcctgagggatgatgtttatcctctggtctatacatggggtattgcttctggagtacccactttgtggtgctgttgacctagaccggtgtgggagtggaaacagggaatggttctagcctcgtggacttcactggtttgtgtgtggggaatccaggcagttaaacaagcrattgcaaatgattgctcttctgggggcatgtaggagggggcttagctccttgagggagctggaggtgtcagggaaggcttgtggaggaagaagatccttacatggagactggaggagtgacagggtcatgcggggcgtgggatggacrgtggagaggaggatattgagtttccaaacccaggggaaagcctgggcgaagggcctgaagggggtgggagctgggagaaatgcagggtccctggagaggccaaagctggaggaggacacagaggaggccaggtcctgcagccttcggctggccagctcgaggactttagagttggtcctgtgtgaaactgggacaatgggtaggcccagtatcgagcacacagtagatactctgtacgtgataaaattaaatctactctggaggtgtggaaattcttccagaaggttgacctggggggaaaaagtgtgatttggcagcagtagggccgtcgggaggatctttgggaatagcttctgtgccctcctcctccccttggctctcatgtggccttcaacttcaccattggaaagagcttcactttcttccaacccctgggaggtgtccttccctgccacctgttctaagtgacactaaaggcagtccaatgggcagcatgacttggatggtctattaaggaatggagaaatgttcaggagtgacaaactgccccaccccagagtttggaatgcattgatcgctgctgggaggcctctgatgaccagggctccgttccctggctacgtatgctgtgtgcgggctggtggcaatggcttcaagatcatcccccagtttcacrgttaaactttggacatgcatctgttasagtatggtggatgttttaatctatttcagtctagatgtttgagattcccctttcaggagtgtgagtcttagtctttctttaatcagcagtgtcaatacacacttatgactgtatggtggaactgtgtcttgcaggtcagttttggctaacctaactcgcaccattcccctgccccactcacccgtgggcatccttcttccatatacaggacatacagatttattttattcctgctgactgcacagggctctgttatatcacagtttatttaatcattcccctaatgatggatatctaggttacagccatttactataattattacatacaatattataagaaacattcttgttcatctgtttctccatacatatccaggtctatctggataaatagcagtggacatcttgatttgtgggtatgagggatataagatttgatagacattgataaattgctctctgaaaaagctacaaagaatttacacgttaacgytggatatacccaatgggcatatggattaccaaatctcattctgatgacaaaaactatttttcctgactagggaaattgaagacaaagtattctggaatccagagttggttgtgatacccacaactgagttctagagtgacattcgagtgcatgaaagggcctgttttctcataccctccacaacttgagtctttagtcatattttaaaatattttgccagctgagagcagtggctcatgcctgtaatcccagcactttgagagaccagagtgggaggatcacttcagtccaggarttcaataccagcctgggcaacacagcaagactctgtctcaacaaaaaaataaaacaactagctgggtgtggtggtgcacacctgcagtcccagctacataggaggctgaggcaggaggatctcttgagcccaggaggttgaggctgcagtgagtcatgtttgtgccactgcactccagcctgggtgacagagcaagactctgtctcaaaaataaagtataatattttgccaatctgatggagggcataaagtgctatcttgtttttagaatcaggatagctgggcatcctggtgcacacctgtagtccccgctattcaggaggctgagatgggtggattacttgagcctgggaggttgaggctgcagtaagccagaattgcaccactgcattcgagcccagggcaacagagtgagaccctgtcyaagaaaaaaaaaaaaaaaaagtctcctaaaatcagaagtgattcctaatggattttttttccctgttagattttaatttaacttaaaaatttcaccctaaggttttcacacatttattaccttaaatattaatatctttttctttttctcctgtagaccgaggctgggccaagatggygtctgtgtttcgaagcgaggagatgtgtttgtcacaactgtttctccaggtggaagctgcatattgctgtgtggctgagctcggagagctcggattggttcagttcaaagatgtaggtactgagttctttggagataagaggaaggcaggggtgggagtagataactcttgcacaacacttctttatggtgaacaataaccattttgtagggagaggagccgtgagctggaatcgatgaaattctgtagttttagtgcttctggctaggatttgtcatgaccaggcaggtcattcaagagcgtgttctccctccctccatgcctgtctcctctataggaatgtcttgaagctctaatgcaatcactactcattagatgtcattgaattttttttctcttatgtagcatcttcaaacattgtatatagccaatgggcatgtagattaccaaaccttattctgaccataaaaactatttttcctgactagacaggctgaagacaaagtattctggagtccagagttggttgtcatacccgggattgagttccagagtgatattctagagttagacagtcttgagtatgacatgggggtatcatttcccaggggcagtttagaccctcaccaagttcgtagtctaattgagaaaaccagtccttctttacttcttcactaaggtcaaggtcagagctaagctcctgcagggaagaatcacatcttgttgttcgcatccctagttcttcacacaggacctcgtatgaggcaggtcctcaataacgtttattgagctgagctgagagttgaagttttgttgatgactgtgatacgttacatggagctgtgcaatcttcaaggtctggtcatttttatgaccccaktgaggattttgaggctcatttggatagccaaggcagagaaataaggtaaacttagatgaggacagacttcctttccttccttccttcctttcttccttccttcccctccctctcttccttccttccttttttcttttcttttcctttctttttactttacttttcttttttcaggcagatatatgattttctcccatgctgtgggtttttttcacttcctattaagaaagtgaaaggacactgttaagtgtcctttgatgcacaaaagttttaaattttgattaagtccaattttttttgttgttgttgtttgagacagggtcttgctctgtagcccaggctggagtgcagtggcacaatcacggctcattgtagccttgacctcccaggctcaagccatcctcctacctcagcacaccaccacgctcggttaattttgtaattttttgtagagatgaggtctcattatgttgcccaggttggtctcgaactcctgggctcaagggatccaccagcctcgacctcccaaagtgttgggattacaggcatgagcaactgcacctggccaggactttgtttcttttagaaacgagagggtgaatgttgaagcatttgggggattgaatgtaagaacactaaggtgtgttttgcctgtaactcacctgtcttgtgcatggaagtatctrttcctaagataattccagcaacattctctagtattaaaaagataataaaatgaccaaaagggggcttagcgcagtgcctcacgcttgtaatcccagcactttgagaggctgaggtgggcggatcacctgaggtcaggagcttgaggccagcctggccaacatggtgaaaccccatctctactacaaatacaaaaattagccaggcgtggtggtgggtgcctgtaatcccagttacttgggaggctgaggcagaagaatcacttgaacccaggaggtggaggttacagtgagctgagatcgcgccattgccctccagtctgggtgacaagattaaaactcagtctcaaaaaaaaaaaaaaaaaaagaaagaaatctattggcagctgttgctactaacatgtatcttgtgattttcgcccccatagttaaatatgaatgtgaacagctttcaaaggaaatttgtgaatgaagtcagaaggtgtgaatcactggagagaatcctccgtaagccaattttttttttttttttcttactgttcaaatgtgaactggcaagggggttaatagtttgcaggacttaatgaacaaatgtgtccctatttgcaatactttttgaggtggtcccagaggcccacctggagggaatgggggaggttgggggtgggatccaggtgctgtggcagctcctaggacaattcaggtagctgagctgagtgaaaggcacatgtcttgcttgacctcatttcttagttatgagaaaacacaatcaccttggggtttctggtgggttttcattcttcaggttttctggaagacgagatgcaaaatgagattgtagttcagttgctcgagaaaagcccactgaccccgctcccacgggaaatgattaccctggaggtaagttctccactttgctggcctccccaggtaaggacagtcatgaagcctgtctccttgaaggccctgagagccasttgcagattccgtacctgtttgcttgaaggcagggaggcaggcctgcatggtcgtctccytctcagggttacagccccaggaaaatcccagtgtgyggtttttagagccacacctgctgatctggagacagctsttttcctttstcagcatagccctcgggaagcttagcccactttgaggagttgattgcttttgtgggtgtttgattcttacaggcagtgtggtcttgtctgctgggtgccactgaatgggctgagtgtgggcataatgggatgttttctaattctctggtgggaagcagctgatgagttggactcactccagatggaagctgcttctctgactggcttctgtaggtcaactgggagaagactgcagttttcaaggacatttcagctggtggggctctccctctttcctttccttgtctatttccttccccttcagtcttttataaaacactgaataccagctgggcgcagtggctcacccctgtaatcccaccactttgggaggccgaggcaggcggatcacgaagtcaggaattcgagaccagcctggccaacatggtgaaaccctgtctctactaaatatacaaaaattagccgggkgtggtggtaggtgcctgtaatcccagctacttgggaggctgaggcacgagaatcgcttgaatccgggacgcagaggttgcattgagctgagattgtgccactgcactccagcctgggcgacagagcaagactccatctcaaaaacaaacaaacaaacaaacaaaaaaaccactgaatacctgccacgtgcaaggtagcttagaaataaacatgactgtgccctccaagggcttatagagcagatggtggggacagggatgaggggcagggctgggagaggaagtgaagaggtaggcagagccagatcatggaggaccctgggggacttaactgaaaaagcaggtattttatcctcggcagtggaacagctcattcagggcgtgggcaggtaggcaaggcttcacctagctgagccttttctctggctgggttttttttttttttttgaagataacttcaaattcttgaaaatttcaaagccatgagtagtataaatcttgatactcacatagaaatattagattgtcaaatcttctagaaaatattttggaccttatcatatttttttgagatggagtcttgctctgttgcccaggctggagtgcagtggtgtgatctcggctcactgcaacctctgcctcccaggctcaagcgattctcctgccttagcctcccaagtagctgggattacaggcatgcgccaccacgcccagctaatttttgtatttttagtagagacagggtttcaccatgttgtccaggctggtctcgaactcctgacctcaggtgatccgcccaccttggcctcccaaagtgctgggattacaggcgtgagccacctcgcctggcctgtttattgatttttgactgtattacaaattaaaatggaaaagtatgtaaaatatttatgtattaattcacttgaaaataacaataatgtctcattacatkgtaacattttttaagtgaaaaatgactgtcttttccaagacaaaaacactttcatgagaaggatggcattgtttgtgaatttttaaagtgcttggctaatagaaacagctggtttctcacacctgcttctactttaaatctgttggtgatgtgctgtttttaytgaaggagaggaagataatccagccttacacagataagcagtgggaaaagggaggaatattttaatagccttttcaaataattatggatattcttctttgatattacactgaaacttgaccagcatagagcctgtcttgattttgttaaacaggtaacatgtgctgcttttgttttcaaactgagttggctgtagtaccttaataaaggaattcatccaactgggtttagttttggctgacttcaaccatgccaaggcacacacattttcaagtttaaccattttaagtttaaaagattcaatcttgactgatattaataagcttttctgggtggggggagctaaaatttgagtggatagccctttttatttttgggggaaatttattgttttgggctatatcgtttatcttttatctctttggtaagggtgtctcttagatggattaaaaaaaaaatgtctagcatgataggccaggcgcagtggcttacgcctgtaatcccagcactttgggaagccaaggcgggtgtattgcttgaggtcaggagttcgagaccagcctgactaacatggtgaaaccccatctctactgaaaatacaaaaatattagccaggcgtgggtggcrcatgcctgtaatcccagctactctaraagctgaggcaggagaattgtttgaccccaggagagggaggttgcagggaaccgagatcgcactactgcactccagcgtgggtgacagagcaagactgtgtytcaaaaaaaaaaaaawaataataataacatgatattttaaggtgttaaagctctacattcatacatttgtaggaatagataaggggcaatcagatgtgtgcacaagtccttccttagagtttttcttctgaatgttatttgctgtaaaaatgaaattaaaacagcaccagggctggccatggtggctcatgcctgtaatcccagcactttgggaggccaaggcaggaggattgcttgagctcaggggtttgagaccagtctgcccaacataatgagactctgtctctacaagaaaataaaaataatcagctgggtgtggtggtgtgcacctgtggtcccagctacttgggaggctaaggcaggagagtggctaccagaaggtggaggctgtggtaagctgtgttcacaccactgcaccctagcctgggcaacagagtgagaccttctctcaaaaacaaaaacaaaaacaaaaacaaaaacaaaaaccaccagcataaaagtaggagagtaatatcttttaccattcattgctcactggaattgatttgttgattgattgatttgactaatcctgcagttagctgtgttcccccaacattgctagagagttgaatcctttggcaagagtacaccaatggctctgggcccctgccttgtcgagtttctaaagaggcttttataacagtcctagaggaaatactaattcaggggggagggaaaaaaccaccatcccctcagaaactgccctggcttttccttgttttcaggctttattctcatgcagctatacttttacataattatatatccattgtgtatagtaatagcagcattatttttatggcatccttaagtggatagaggaaatrattgggaaatgaagatttacttttccccccaactttgtgtcattatattcagtgttcaaaattcagggtaatggctttctctgagacgggaggtaatggagtggaactgaagctggatgatgggcggataggattcacgctgcttgtgtgtgtttgaaattttccatagtaattcaattttgtctaatactaagcatttcagggagagctaacatttacaggattatcattttttattgtttaaaaaaaatctctttgtgccaggcrcagtggctcacggctgtaatcccagcactttgggaggccgaggtgggtggatcacttgaggtcaggagtttgagactagcctggccaacatggtgaaaccccatctctactaaaaatacaaaaaaattagccgggcctggtggcacacgcctgtaatcccagctacttgggaggctgaggcaagagaatcacttgaacccgagaggtggagtttgcagtgagccaagatcatgccactgcactccagcctgggcgacagagtgagactttgtcttaaaaacaaaaacaaaaacaaaaactctgttaacagtgtcttttagatggattaaaaactagcatgataatctcttctttaataggtgaccttaatccatttccgtttattgtgatttctgattcactggctttttcrgttattattccttttgttttttacttcccttccctttcctgtctttctgtaatacctgccaacccttccccactactgattggtgtgcaagctacagatgacagttacacttaacacttcaaggcacatawtcactaaatttttctcataatatttgctactggttcaattatcacccctttgtggatatatgtcctttttttccctgatagcctttaaagttttatctttgttctatagtttcactcctgtctgtttcagtgtggatttgttattgtttttgttaaacattaaattgcattagtagaatttttataaaacatgtaaggtataaaaagtaaggatcagcacacaccatgtgtctgtcgccctgtgtaagataacggtacccacaggggcattcaaaaaacctgtgtgcccctcctcacccctcctccatctcctttcccctcttcccttcgagatcatcattatcctaacttctgtatttttctttattttttcatagttttattacatatttatttttctaaataacatatggtatagctttacatgttaaaaaattttctctaaatggaactatattgtttattcttctgcaacttgctatttcatcaatttcatatatattatatacatatacatatatacatacgtgtgtgtgtgtatatatatacatatatatatatatwtwtwttttttttgagacagagtctgaaaaaaagctttgtctcccaggtgggagtgcagtggtgcgacctctgctcactgtaacctctgcctcccggattcaagcgaatctcctgcctcagcctccagagttttgcccggctaatttctgtatttttagtagaaacagggtttcaccatgttggccaggctggtcttgaactcctgacytcaagtgatccacttgcctcagcctcccaaagtgctgggattacaggatgagccaccgtgcctggcccatcattttctattttaagactccatattgtttaatgtttctgaagttatttttattgttatttatttatttttttgaaatggagtcttgctctgtcgcccaggctagagtgcagtggcacgatctcggctcaccacagcttctgcctcccgggttcaaataactctcctgcctcggcctcctgggtagctgggattacaggtgtgtgccaccattcctggctaatttttctatttttagtagagatggggtttcaccacattaaccaggctggtcttgaacgcttgacctcaagtgatctgcacatctcggcctcccaaagtgctgggattacaggcatgagccaccgcacccagcctggcctagtgttttaaacgagaggaggcatgatttgccaaaatgtcttaacttctccatgaagtggccatccactcctccaagtacttcctaatcctctcgtttggtgatggaactcttaagagagcatgcacgtgtgtgtgtgtgtgtgtgtgtgtgtctgtgtgtgtctgtgtgtgtctgtgtgtatgtgtattagggtctgcaatcatgttatgtgctgattcctttgattttttttagtcatctgttgtgggtaatgtatttcaggaatgtcatrgcactttctgttggcttaccttctttttccttcctgcatagactgttctagaaaaactggaaggagagttacaggaagccaaccagaaccagcaggccttgaaacaaagcttcctagaactgacagaactgaaatacctcctgaagaaaacccaagacttctttgaggtggtcacgtgggsatgagttactaaagggcccgttcctcagaacctcaaatttccattttggaaactggctggcctgggatctgagtaaatcactctgtttctgttccatggctaggccattggtgagggcgggggagtattttgggtggaataattgtagtgctggttggattgaagggaaaaatattatggtgctcagtaaaatgtatgtgctgaaaatggctcaggcagaaagagaagtcagaacyaagcacagcagttggtttgagaagttttagggttttggtaggaaaagaccagggaagctttttgatctggccaggagcactctgttttctgacttctgttaactttttgtggaaaattaaagcttcactaaaaccagagaaaatcttgaggtgtaggtgccttttgagtttccctaaatatatttaaatgaaaatcatagtgctttgactttcagacrgaaaccaatttagctgatgatttctttactgaggacacttctggcctcctggagttgaaagcagtgcctgcatatatgaccggaaagttggggttrgtgtaattcttgtgtgtagatgggtccctggtcctggcgagtgatttctgagtgagtgaatgaaygggtgaacaaatagccaytggaatggggactgtttcccatggatgcaaagcctctgccaagcgatagacccatatgtaacttactaggttggtggagtcggaagtggtgtcagcttcttgttagtggcgatgctgacctccttgagcctgaagactgcaatgtttatattgctcccccattggaagctgtggggatcattgttcagatgggttatcacaactcttccctggcgttggaacaaggctatggggacttatgtttttcctttctctttaaaatactattttgggagccgggygtggtggctcacacctgtaatcccagtactttgggaggctgaggtgggtggatcacttgaggtcaggagtttgaaaccagccyggscaacatagtgaaaccccaatctctactaaaaatacaaaattagtcaggcatggtcgcacgtgcctgtaataccagttacttaggaagttgaggcaggagaatcgcttgaaccctggaggtagaggttgcagtgagccaagatcgtgccactgcactctagcctgggcgacagagcaagactccagctcaagaaaataaaataaaatattactttgataataaaatgcatttggagtttgaattttttttttttttgaaacagagtcttgctctgtcgtccaggctggagtgcagtggcctgatctcgacttactgcaaactccgcctcccaggttcacgccattctcctgcctcagccgagtagctgggactacaggcgtctgccaccacacccggctaatttttttgtgtttttggtagagacggggtttcaccgtgttaggcaggatggtctcgatctcctgacctcgtgatccgcctgcctyggcctcccaaagtgttgggattacaggtgtgatccaccgcacctggcctgaatttgtgtgttttttttgacacgggctctcactctgttgcccaggctggagtgcagaggtgcaatcatagctcactgcagccttgacctctcaggctcaagtgatcttcctacctctgcctcgcgagtagctggaccacaggcacaatgccaggctaatttttaaaaaattttttagtagagacaaggcctcactgtgttgcccgggatacatttttaaatgtaattagaaatgggggtcagatgtggtggcttatgcctataatcccagcactttgggaagctgaggcaggaggatcacttgaggccaggagtttgagatcagcctgagcaacatagcaagactctgtgtctacaaaaaaaaaawttttaataaaaaaaagaaatgggatagttatgcaatcaagttatttccaagaagcagtgatatgatgtgtcgtagccatgaaaataatgtggtgattcaaaatggtaggattttgttcagtgcctaagtgaaattgaggcattttaaagcatttctgaaaattgtgagtttgggatttatgattttttattcaataaatatttgagggcctgatatttgaggcactaggcattgaatttgaaatgaaaataaaaatatttattggaaatatttgatcagaaagtaatacaggatcaatgaacatttaaagtaataagccagtgaaagtcactggctaacatgaraagtttgggtcagcagttatctacatgcttggataatggaaaaaacagatatatatagacatcaatgtatttttccctcttagtattaaaatatttttggaaaaatgcatagagacyactgttgaatatttgctatcattagctacaatgcatgatgaatggtctatcatattcttttttttttttttttttttgagacagagtttcacccttctctgcccaggctggagtgcaatggcacattcttggctcactgcaacctccgcctcccaggttcaagtgattttcctacctcagcctcctgagtagctgggactataggtgcacgccaccaggtgtggctaattttgtatttttagtagagatggggtttcagcatgttggccaggctggtctcgaactcctgacctcaggtgatccgcccgcctcagcctcccaaagtgctgggattacaggtgtgagccacggcgcctggccattctatcatattcttaattgcaattagtgacgatatagtattggaatgattaaggatatttcaagataccaaagaaaacagaaggtcaaagggacttggggcaagtcagggctggatgcggggtggccttgggactcatgtcggtagagctgtgtcggggtccctcctrctcacagagtgaatggcccttcctttcatggtgtgtcttcacgtcctacagggccttctctctgcatcccaatccctgtgccttaaggaatgtcttcccttctggctgcctaggttcatagccgrtgtgatcaacagggagaggatggcttcctttgagcggttactgtggcgaatctgcygaggaaacgtgtacttgaagttcagtgagatggacgcccctctggaggatcctgtgacggtgggaaccttgggctgcaaaaactttctctgagacttcccatagccctcagcagaagcgyttcrttctcccaaaacatgggggatctttagtttgatgagactaatatctatttcctttttttctcctttttttccttcccttttactttgttcctttttaaaaatatatatttgaaaggtcagttcaaggactgattcttgtcaacacctcataaytggtttattcttcccagagacatagctatacttttctctagaacttagttatactagtactatcctaggcggcagctgtgtcttaaagaactgagaactgattgaggtcagcttctcaagcttcaatgtgcacgcgagcatagaggtcacccggggatcttgttaaaatgcaaattccaggccaggcatggtggcttatgcctgtaatctcagcgctttgggagcccaaggtgggaggatcgtttgaggtcaggggattgagaccagcctgggcaacatagcaagaaaacatctctacaaaaaaaagttarccaagtgtggtggcacacaccggtagtcccagctacttaggaggctgaggtgggaggacaacttgagcccaggaggtcaaggctgcagtgagctatgatcacaccactgcactccagcctagggaacagagtgagaccctatctcaaaaaaaaaaaaaaaaaaaaaaaaaataggctgggcatggtggctcatgcctgtaatcccagcactttgggaggccgaggtgggcggatcacctgaggtcaggaatttgagaccatcctggccaacatggtgaaactctgtctctactaaaaataaaaaaattakccaggagtggtggcgcacacctgtagtgccagctacttgcgaggctgaggcaggagaatcactggtacccaagaggcggaggttgcagtgagctgagattgtgccactgcactccagcctgggtgacagagcaagactccctcaaaaaaaaaaaaaaaaaaaaaaaaaaaaaattctgagtcagtgggtctgagtggggcctgagattccgcagttcttacaactcccagagaatgctgatgatgtatttgccaatagatcccacacttcaaacaacaaggcttcaagggggctcagcccttagtgccatacagttgttgctgtgaattctgtcggatgttgctgtctcaccttccagtttgtatttaatccacttaccctttaattcccagaagctaggcttatttctgagcgtctataatctttttcagattagaggctaaaaaaattaattttaatgaaaaaacaacaaaattcattttgatgaaaaacaactttaaaataagtgaaatttaaaataagaaagattatgaaaaaaatgagaaaccccatcactctaatgtcttcatttgtattttgcctcttgtactatttctctctatagccgtagacaggtataattttatatgattgtagyatacatggaaataatttttttcttttctttgttttacctaatatgagatccctccccatattactgtgcatccttcgtaaagatcatttttaaatttgacattaaatcatcactttttataatcctgttttgacrtatgacagtcatagtgggagagaaagtaaaagcatctggaaaaagatgagcgtggacgccgaaggtcaccaaagggaagtcatgagattagagcrgattcctgattctggtggatcaggagaaaagaaaatttaagagactcagaaaaggaccagggtagactccacgggtagagaaaccttttggaaataatgtaacgcagcagctctgaaaatcctaaaacaccgccacttgctcccgtaaggaaatgccaaagacaggattcattttgatagtatttttaaggaatrtctawtgtgtccactgagttgacgtgacgttgactatctattttggacactttatttctaatttttctccagaatgtagacaccatgatgagcatctttatgcatgtgkatttttatttgcttttgaattactttcataataaacaagttcaagaaaaataggattgctggcttaaagggtgcgggcattttaatgacacccgataggtcccgacaaatggcctttcagtgacttttctgattccagtgcctcgagtagtatgtgatgagtctattggatttgtcataacttttccaacaatagtttttgtttttgttttttggggtttttttttgagacagggtctcactctgccacccaggctggagtgcagtagtatgatcatgactcactgcagcctcgacttcctgggctcaaacaatcctcccacctcagccttcctggtagctgggaccacaggtgagcaccaccacactcagctaattcttgtattttttgtagagatggggttttaccatgttgcccaggctggtcttgaacccctgggctcaagccatccaccygccttagcctcccaaagtgctgggattacaggtgtgagctactgcacccggtctgggttttgtcattttacctttaccccctcaaactaaataagattggaagaatgcattgtttcagctcatatttctttgcttacagtaagagttaaacatttgcatgtctgcttgtggaacacatcttcctttcttgtgaattgtccaacttggacttgacaagtgtgatttaagcagcagtcttatggcacacaagcaactgtgagtcaaaaaatctgagcaactgtatgtatgagtcaaaaattgggcatggctttacctttgttaaatataaaacacctactcatccccaaaatgtcggtgttgtgtgttaattaactctggtgagccagtttatcagccagctgtcttcgttttaagccttgcaatattctcttctgaatggtttcttgtttattatcatatctcttaaatgtggggcttagagctgaatataaggtctggctgtggtccaaccagcatcgggaacagggagcctgtcaccttaaggctgcattagcctctgtgaggtcctggatggccttgctctcaactgtgagctatgaacttagatgaactaggaaagttacagtttcccagttttaaatgtatgaattgtgtaagcctaaaaacaggactttacatttctctctattatgttttaaccagaaagaaacccccccctttttttttaacttattctgattttccagaaagaagaaattcagaagaacatattcatcatattttaccaaggagagcagctcaggcagaaaatcaagaagatctgtgatgggtaagagggagtgaatggctctttcttcagtgatttgggccaggattagataaagagatgtgcaatgccaaatgcacaygactgtggcttctagaggtcagtaaggctttagaataactktctcacataaaagtcagccccaactgatttttaatagttgtaagaatatgaatagggagaacttgaatatgcaaaatgtgagggtaactaaaagtggacatgttccccatttcagtctattccatctgagacttttcatcagctgctccasagtaatccaactgcatggctaacttgttttggattttacagaatcgtgttacatgtagctccatagaagcagaaatgactcagtgcagaggatattaatacattaatagattcttaggaagggrcaagcccagcttgcagtcttatttacccagcaactcacaggttttatggtttgaatgaagctcattcatataacagaactgcagcctcaattcacagcacaagtgacgtactgggaacccttatgactgggactccttttccagtggccaaagacgcagttawtctaggataggctggccatctaactaaagtcagcaaaygatgtcttagcagaaaaggggatgcagaatgctttgcagcaagaactcacctgtttcctttggaatatattaaacacaggtttcgagccactgtctacccttgcccagagcstgcggtggagcgcagagagatgttggagagcgtcaatgtgaggctggaagatttaatcaccgtgagtgaggggtttgggygcatggtctgatggcagctgcaggagggctgcctctgctgttttcatacaagccctgccccccagggcccttgctgggaggctggctggaatgctggctatgcctttctggttgtggctgtggaagatttcacaattgggaaactgttcgataarctagagggaacgaagctgtgtcttaagaatgctttgcccagggtcagatttgaccacagccctagtcagccttcaggtggccaccccgatctgataaaaggcaccctttattgccagcctcggcctagacggaatctatgatacaaccacccagccaattaagttgaacaaccagtttgactgattattttcccactgaattgcctggttgtttaagctgatgggttaattctgtaaaaacagtgagtctagtttcaccatgtgaacattcattcatcccaaactcattttctttgtaaagtctgtcaccatccagggtcactcaacacacttatgatcagaaatctttcttcaatcacagcagctttgaaagtaatcactgaaaacagctgggcctccctcgctggcagactctcatcagtgctagagttcgatagaactttcggttatgatagaaggttcatgtgtcctgtgctgtccaacrctgtagtcacgagccacatgtggctattgagcccttgaaacatggctagtgccactaagtcatttagtttgtatttttaattttaattcaatttaaattttagggctgggtgcggtggctcatgcctataatcccagcactttgggaagctgaggtgggtggatcacttgaggtcaggagttcaagaccagcctgaccaaactggtgaaaccccatctctactaaaaatacaaacactagtcaggcgtggtggcagtcacctgtagtctagtctcagctactcgggaggctgaggcaggagaatcgtttgaacctgagaggcaaaggtttcagggagccgagatcgcgccactgcactccagcctgggcaacaaagcragactccatctcaaaataaaataaaaggaaataaaatacataaaatttagtagctgcatgtggctgtggtagaagtcaactcagttttagattctggacaagtatgttaagaaattagatatgtgcctctttcaaaacccttaggctagcagacaactttacttttccagaaaacctgtgtttaatttttttttttttttttttgagatggagttttgctcttgttgcccaggctggagtrcagtggcgcaatctcggctcaccgcaacctccgcctcccgggttcaagtgattctcctgcctcagccttccgagtagctgggattacaggcatgcgccaccatgcctggctaattttgtatttttagtagagatggggtttctccatgtcggtcaggctggtctcgaactcccgacctcaggtgatccacccacctcatcctcccaaagtgctgggattacaggcgtgagccactgcgcctggcctgtgtttaattttttaatcctctccattacttctttgtcacttgtcaggaacactgtttccccraagccattgaagtcctttccccccaattctccatgcttgattttatgaaaacgtcatgaggagaatggaaaataaattctgctagatgtgtgcttacatttagtatgacgggttgctgctgtgtcgagggcttcagatgatcccagctgagcagcttctgcaggggcagctttctcctttggctcagtscctgccaaagatgaatcttagacactgtctgatgctgaggcatataattcgggctatgctctttgaggtttctgaaagtcacctctgtgctgaggtgctcttgtctcctggaaatccccaggccagggggcattatattgcwaagtgacaggtagtattgggcttgtgagaygcttcggtggcctcatggctctygttaatcttagagccagcatgtctstcttacagtgtgtctcttacagaggccatgtgtgctgaaaaagattaccctgtttgttgtatcatcaaaacataaaaatgattccattaaataaattctgtgtgggcccaattgtccattcattccttcattcattcacttgtcatttattggagggattatgtatgtaaagggttgtggtagatgtagtaatctcttagggttgctgtaacaaattacagcaaactgggtggcataagacaataaagatttattctgtcatggttctggaggccagaggtctgaaatcaaggcgtcagcagggccgtgctccctcggaagacctgaagggagccccctccttgcctctccccagctctggtgctgcgggccgtcctccgcattccttggcttgcaagtgcctacttctctgcctctgttgtcacgtggtattcttccctgtgtgcctctgtgtctacgtttcttatcaggacagtggtcatatgggattagagcccattcaaatccagtatgacctcttcttaacctgattccatctgcaaagaccctctttccaaaaaggccatattcacaggtatcagagttcaggactcttttatgtggacaattcaacccataacaatagracaatgaggaatttagaagaaaaggaagatacaatctctgcctaagggttttagcctctagcgggggagataaactgctcaggagagttcaaggccagrtgacagccacaggtcaaaggagcctgccagagcagaggaagctgctgtggcctgtgacactccatttttggcaycttgtcaaacagctctgtgaaggttctctgttttcctgtgtgttgttttttgtataggtcataacacaaacagagtctcaccgccagcgcctgctgcaggaagccgctgccaactggcactcctggctcatcaaggtgcagaagatgaaagctgtctaccacatcctgaacatgtgcaacatcgacgtcacccagcagtgtgtcatcgccgagatctggttcccggtggcagatgccacacgtatcaagagggcactggagcaaggcatggtgcgtggcaggtggagccaggaggggtccgatgagtcagcccctctgctgggctctcagagggtgttggcctcatgggccacatgaactcaagtgacttggtggtaggattgcttccttcatctttgtgtcttcagttatcaaccccactcgaggacataaaagaaattcctttgtcttttcagtgtttgacagttgttcaccattttttgaccttttgtgagtacgtattgagctttttttttaaaaaaaaaaaaatagaatctcgctctgtagcccaggctgttgtgcagtggcacagtctcggctyactgcaacctctgcctcccgggttcaagtgattctcctgcctcagcctccygagtagctgggattacaggtgmgccctaccacgtccagcaaatttttgtatttttagtagagacggggtttcaccatgttggctgggctgctcttaaactcctgacctcaggtgattcgcctgcctcracctcccaaagtgctgacattacaggtgtgagacatcacacccggccatactgagcattaatgtgccagtctctcagctagactatcgttttggggggattttgtcttttttttcttattaaagatggggacctcgctatgacacccaggctggagtgcagggctgttcacaggcatgggcatactgccctacagcctcaaactcctgggctcaggtgatcctcccatctcagcctcccaagtggctaggactacaggcaygcgccaccatgcccagctccactctgctagactgtagataccacctgttacctcatggaggttatagtctagctagaaagatgaataaccaagcatctataataagagccaaaatatgtagatcgcttgcggtgtgtcygagatggctaagcactctgtcctcgttgagttctcaccgctccctccattcattccttagacattccctgtgtactaggaacggatctagggcttacacactggcaggccaagaccctgctttgatagacattctagaaagggacacggaggcatgtccgtgactaatgagatttcaggcagtgatgagtggtgggcaggaaaccaagcaggggacggcgaggggcaggatggagagtgggggcttgttctgatcaccgttattcaccccattgaaggagggaccccctcctgccctaaatagtacaagatggccgaacacattaccctgacactggacagacgggcttgacagctgtttttagtcactcgtcttcagagcccaggggagaaggacaccgcacgccatgcgggccacacagggcttgccctcgggaactgcgtttgggagcagagtgaagcagcagggccggtgggaggcaggctctgcagtgaacgagggtgaggtgacctttggttcttgcagaaggatgtgattagcttgtttgaataatttcacggggtgggaggagtgaagccattaggttgaggagtgggtggcatgcagctggttyggccgatggggaactagctgggtggcatatctrgtgacggcagatctcgtgktatctgaagaaaccctctctgagcaggcggcattgatagcatgggaaggttgggggmgggaggaagggtttttcaggcggaggaatctgaaggtaaaggccttgcagtaggaatgggttagaaggtgggagctttctttatccccttcgtacagataaagaaatggaggcacagaaagtagaagtaacctgactacagtcctatagccaggaggcagggtttgaatacagaaactgttcctcaaaacagtcgatgcccccacatcatggtccaaaaaccacctaaatggggcacttaaaaagcatttcaaccaggctgagcagggcgggggtgcgtcctggaggaagtgatgcatgcgcagagcgctgggaggctggccggggagcaggtgaagggaggtgcggcctcctgaaagcagaggaggattgaagctgggaccgtgagcactcgtccagctggtgtcagatcccagtgggtgtgcatgtggcacgtgctgtcgggtgtgcggtggctgtacggttcctggacagggagcacttggaattgttaagactcgagtaggtagaatggatgcagtggctcacgcctgtaataccagcactttgggaggctgaggtgggaggatcatttgagcctaggagttcaagaccagcctgtgtaacatagcactgtatggctgtagtcccagctactcaggaggctgtggcgggaggatcacttgagcccagaagtttgaggctgtagtgagctatgatcatgttactgcactccagcctgggacttcctgtctcaggaagaaaaaaaaagaaaaagaaaaaagacttgagcaagtggagaagagaggtggctagtgtagacatggccagtttccatggggaagcgtggggaagggtgaaggtgtgaatggaggattaaggcatattgttaagtagtcttgatcacaagactaaagagttttgatttcattctttaggcgataggcagcctttgaagattttaaagcaggagagtaacatgagtaaaatagtgctttttgtttgttttattaaaagagtgcttgagcaatctrggtgttagataaacggagaggggagaggctggcagagatgctgaggcttggagctagggtgatagctgtgggaatcggaggaaagattccgaaaggagaactagcaagctttgctgggtgatcgactgactgaaaccagagaaggacaaatccatgattccaagattctaggaatctgggagaatggaggctctgctgaaggggcagggagtttgtggaggggacctggctttgtggagagttgatgaattcaggattagrctcctggattttgtggggttggtgacacrttggagtttgaaagtctaagcaggcaattaggaaaaaattggggaagggccagagccatttggaagagggggatgaattgagaaagtggagaggaggaaagcatagagggccaggagtcataacattcgcatttacagcagtaggagacgggagattgtcagagactccagagggactcaattctcttgacagccctcccatgagatgaattggataagtattgggaaggtattaactctctacacataaggtcgtgagtctcagagagatcaagagattgccccaagttcgctcagtgagggacggcaggagctgggactgtgacctttgtgctgacacccagcccaagactcttctccttacatctttgtcgcttttttttttttttccaggaamtaagtggctcctccatggcccccatcatgaccacagtgyaatctaaaacagcccctcccacatttaacaggaccaataaattcacagctggcttccagaatattgttgatgcctatggtgtyggcagctaccgggagataaacccaggtaaagatctgatgaactgcacgactgggtagcttgaaagtgaaaactggtaagatggacccctgaggtgaccgaggtggtgaacttgttaaaactgtgaggcttggggctagggtagtagctgtgggaatcagaggaataagtaggatagtaggggcaagtagtaggattcctaaaatcctccttggtttcgtaataccctgtggtgtcgtctataaatgccgattggtgaaagaattgttctttgtcttcacctgtgcacccttaaactgcaacctcatcaggcagccgaagtcagtgttcatttccttcaccaatacaatgagggccatatcttggcatcttcacagtcctgtggttattgtgtgggaaagacaccagtacacagaacttagaagactcgatkcttggtgtcctaagctgtggaatcttgctaccttggttaataaaataaaggtgtaggctgggtttggtggctcacgcctgtaatcccagcactttgggaggcrgaggaggtggatcgcttgaggtcaggagttcgagaccagcttgaccaacatggcaaaaccctgtttctactaaaaatacaaaaattagtagggcatggtggcaggcagctgtaatcccagctactcaggaggcagaggcaggagaatcgcttgaatccaggaggcggagattgcagtgagctgagactgcaccactgcactccagccttggtgacagagygagatcctgtctcaaaaaatagataaaataaaataaaatgaraggatagaccagataccctttatccaagsagtgcatggtgattgttcttctccagcctgaggcccagtcgaatttgtggcctgtaatgcaggggcctcctgggttgagggtccctgcgagcaaactgctggtggtgtgtggkgcatgtgaatggtggrgaaacagacaaaagatgggtgtggagaagagtrtagaaagcacctagagagagaaagctgatcttgtgttccatcaaactttgtgatttttttttttttgactttgtgatttttgacaagtcacttagcttctstaagcctcagcacatctgtaaagtggggaataagaatgcctactcataggctgggcrcagtggctcatgcccataatcccaacactttgggaggccgaggtgggaggattgcttgaaaccaggagttcgagaccagcccgggcaatatagcgagacctcatctctatagaaaattttaaaaagtagttaggcatggtggcacacatctgtagttccagctactcaagaggctgaggtgggaggatcacttgagcccaggaggtggaggttgcagtgagccatgattgtgccactgcactccagcctgggtgacagagcgagacccwctttcaaaaaaaattgaaaaacagaatgcctaggaacagatgcactcatttatgtggcagctaagcatgtgtcagggtagggatggtgagaaaagacaaccagaaaggcttaaggaaacccgcatgcaaatcgtggagctgtggcagggaatctgaggtgggggccccgaggctgtgctgaggcctcaggcgttgtgtgtctcccctccgcagccccctacaccatcatcactttccccttcctgttcgctgtgatgtttggagactgtggtcatggaaccgtgatgctcctggctgcactttggatgattctgaatgagagacgcttgctctcccagaagacagacaatgaggtgagtgtccattgaccgtcttgccctgattcattttcagaatatgaaaatctgtatgtggttttcaccatagaaataacacatttttatgaaaaataaaggagagaaggaaagtaaaaaagagccaaattaacctaaaacttctggccaaaggtaattcctttggatggtttggtgccgttcctttcagcatttttgggtttttgttcatgacttgataaggcatcgatttttctttttcattatatattttttctaactctgatgtttttgcctgattatgaaagcaatacataatcactgtaaaaattagaaaaatgcaaccatctaatgaccgagagaaaartcaccatgaatgcttttggatatctttccaatttgtttgtgcttatccaccaatttttcaaaaattggcatcaagtaatgcatactatttgtagtgtttttacttaaaatatcatgagtatttgttcatggcagaagcagcctgggacccgtgttcttctgaacactgagaaaccctgaacatcgtttccccactcttaagtttctccacctttgcagagtgctgtgaaggctgagacaactcaggagggtgcattggttcaaagtttattggctggccaggcrcagtggctcacacctgtaaccccaccactttgggaggccatggtgggtgggtcatttgagatcaggggttcgaggccaacgtggccaacatggtgaaaccctgtctctactaaaaatacaaaaattagccaggcatggtggtgggcacctgtagtcccagctactcgggaggctgaggctggagaattacttgaacccgggaggtggaggttgcagtgagctgagattgcgccactttactccagcctgggtgacagagagrgactccatcttaaaaaaaaaaaaaatatctgcaatgttttattacaggttgaattaattacagctaggtcagcgatgtcgaggttagtgagcagaatcaacctgtgaccaatatagttttccatgccaagcttaaagatatgattttgtatggtaaacattttgagtttcagagttacacgtcagcacttcttggaatgattgacacacattattcagtattatgagaaagcactttattcttctcagcagacatagtcagacagggaatcaactttacaatgacaagacgcaaaatgagtatatatctgacttgtcataaatrtagcagccatgggaggccagttcagtgcttatttcctggaagcacctgagacaacagccacctgctttcaagtcccttcctaagcagatgaggccttgcttgcacttcagtttattttctaatgcaggtgcaatggaagaatctgaggcatgcatatatatataatatatattataaatatatattatrttataaatatatatattatttatatttataatatatwttwtatatatatatatatattttttttttttttttttttgagacagagtcttgctctgtcacccaggccggagggcagtggggcaatctcagctcactgcaacctccgcctccygggttcaagtgattctcctgcctcagcctcctgagtaactgcgactaacgtgcataccaccacatctggctaattttagtagagacggggtttcaccatgttggtcaggctggtctcgaactcctgaccccaggtgatctgcccatgttggcctcccaaagtgttgggattacaggtgtgagccatcacacccggcctttttttttttttgagacacaggctggagcgcagtggtgcaatcttggctcactgcagcctccaactcccaggttcaagtgattctcctgcctcggcctcccaagtagctgggattacaggcatgcaccaccacgcccagctaatttttgcctatatggtttttgtttcatgataacaaataccagcctaggactttttggygcacctatatgttccaaaaaccatgatgtgtgtgctcttcctgtctggatgattgatgtctgctgtggtcatgtggctcccccaagggtgcctgcaccggtgatgctggagatatcctgtagaacgcttccctctggggtctgcttcagagcccactgacaatcatcctctctgtctctctgaggccagatttggaacaccttcttccacgggcgctatctgatcctacttatgggcatcttctccatctacacgggtttgatctacaatgactgcttctccaagtccttgaacatctttggctcttcttggagtgtccaacccatgttcagaaacggcacatggaagtgagttgacagacagrgatggtgtagtcgctggccatccaggtggcctcagtgactgttttcatggttgggggagtctacacctaggtctactcagaggtgcacttgaaaattcaaataggccaggctcagtggctcatgcctgtaatcccagtgctctgggaggctgaggcaggtggatcacctgaggttaggagttcgagaccagcctggccgacatggtgaaacctggtctccactaaaaatacaaaaattagccagatgtggtggcaggtgcctggaatctcagctactcgggaggctgaggcaggagaattgcttgagcctgggaggcggaggttgcagtgagctgagattgcgccactgcactccagcctgggtgacagagtgagactccatctccaaaaaaaaaagaaaaagaaaaaatagccaagtgtgttggcacgcctttagtcctagctacttgggaggctgaggcaggaggatggcttgggccaaggaggtcaaagctgcatgagctacaatcacaccattgcactccagcctgggcaacacagcaagatgctgtctcaaaagcaaatgagaggctgggcacggtggcttacgcctgtaatctcaacactttgggaggccgaggcgggaggatcacttgagttcaggagttcgagaccagcctggccaacatggtgaaaccccatctctgctaaaaatacaaaaattagctgggcatggtggcacatgcctgtaatcccagctactaaggaggccaaggcacgagaactgcttgaatccaggaggtggaggttgcagcgagccgagatcacaccattgcactccagcctgggcaacagagcaagactccaactgaaaaaaaaaaaaaaaaagcagatgaggaaatggttggttttgtaatgctgtctccctgtatttgtcctgtggctgacagagttgggggcaggggacacctggtaaggatatgtgggtactgtagaatagagagacctggaagctctctaaatccccacagtccacccttcccctatgcattctacagtgattttatgcagttaatcagacaagcagacttcagaatggaaacataaccttttaggaatggagacttttatggggagaaagattttagagtttgagaggtaggtccatttaatgaactgggggagaacaggggactctggaggagaggggactgtgaagtgaacaaatagaaattgcgacagcctcttgattttgggggtgatcttaggctacgtgcatcacgtacctgagattcccacagtagcgtgagggctaatttgtaaaacctacatatcaatggtgacgtttcctaacatctgtctctgcccatctcctttgggtcagcttaagatttccctgtctcattctggaactttcctttgaacaaatgagaaaagaggaccaaagtgaagactgagctaggtaaacatgttcacaatctcttttcccattcttcctctcccaaggaagggacttcacgggtcttactggctcaccaaaatctgtggtgaacgtcataaatgggggacagaatgaacaatcaatttcatccaagagtttttcagttagaaaagattcaatcctgggtttatttattttttttctttttctttttctttttttttttttgagatggagtcttgctctgtcacccaggctagagtacagtggcacaatctcagctcactgcaacctccacctcccgggttcaagcgattctcctgcctcagcctcctgagtagctgggactacaggcacacaccaccacacccagctaagttttgtatttttaggagaggtggggtttcaccatgttggccaggctggtctcaaactcctggcctgaattgatccacctgcctcagcctcccaaagtgctaggattacaggcatgagccacacgcccggcccaatcctgggtttcttttgacaaagctttcytgagggcattcaaagggcttgatgttggcacagagaggctccaagagactgtagaaatatttagtgtggggcaaggagattctaacgcagtctcttcttgtttctctgctaggcctaagttccctgaagtagagatgggattccccaccttaaatatagaaaaacaaaaatatagaaaaatgaaggataaaacgttttctggaatgacatacagacagctatatctgtgatttttttttttttttgctttgcaattagtattctaaagagatgcccaaaagaacaaaactttcataaatttaaaaacaaattaggttgagcacggtggctcacacctgtgatcccagaactttgggaggccaaagtgggaggattgcttgagcccaggaattcaagaccagcctgggcaatatagggagaccctgtctctacataaaatgaaaaaaaaaaaaaaaattagctgggcagtggcacatgcctgtgcttccagctacttgggaggctgagacaggaagatcatttgagcctgggaggttgaggctgcaatgaaccgtgatggcactgttgcaccccagccttggcaatagagcaagaccccgtctcaaacaaacaaacaaacaaacaaacacattcattcttacacttagttctgctctttagatttaaactcataagtatagagatgagttttatttttttatttatttattttttattttgaggtggagtctcgttctgtggcccaagctggagtgcaatggtgcgattttggctcactgcaacgtctgcctcccgggttctagcgattctcctgcctcagcctcccaagtagctgggattacaggcgtgtgccactacacccagtgaatttttatatttttagtagagacggggtttcaccatgttggccaggctggtcttgaactcctgacctcaggtgatccacctgcctcggcctcccaaagtgatgggattacaggtgtgagccaccgtgcccggccgagatgagttttgaaacttgttcaatctgcataatttcgccagcctaccaacatgaaattccatttcccrtagagtatgattgtgaaaggccygaattaactgtcttgttaccactctgcagacatgggtatgaatgctgttctcttatgcacctgcaaatgtcttcttccccaattcaagactctttggtcttgaattggagcaatgctcagccatatgtgaagggtcaggagtataaggcagaacctcattatcactgtggcagaagaaaacgacagctgaagtacacagtgagctgattctggtcaccagctgcgacctgggtcttggacctgcttccttgatggttgaaagaccactgaaaacattcctgtagtcactggagttgggcgtattgactcaacaagggaaatggtgcatcattgggaaaaccatctctattaagagggtattagaaagggcttagaggatttagcctttgttaggaggcggggatgttgggtcatttttgtggtttggaccgtgtccttctttttgcctgtatcgaggtatgattgtggaatgatcttgttttttctcactctatcatagtcgccaggtggccttgcctgatgttgctgttctatgaagttgcttatgctcagcaggagacacgatgrcttagctatgggtgccaggccagttccttcctgtcaggggtgacttttccctttatgaacacacaaacacttctctgctatggaaatccagccatttgcactgagtcatgccattaggatgggggtcacgtctgggcaagcgagtcacggtcagctgctgccactgcacattgagggccaggacagtaggccaggcttcccgattccctcagctgctacctaaggccctcagcacctcactgcagaagggagggagtgtatttctgggcagcctgtcaagactgtctgctgtctgctcttcacatttcattattttttaatttaatttaatttattttttgtagacggagtcttgctctgttgcccaggctggagtgcagtggtgcaatcttggctcactgcaacctccgcctcctggtttcaagtaattcttctgccacagcctcctgagtagctgggattacagtcatgtggcaccacgcccaactaatttttgtatttttagtagagatggggtttcaccattgttggccaggctggtcttgaactcctgacctcaagtgattcacccacctcagcctcccaaagtgctgggattacaagcatgagccaccgtaccaggcctgtwcctcatcatttcaaatgctcattccttgggcccttccacagatgcagttcttaaaaaaaaatcaactcaacattctcatccccttaaggcttgcagagacagagtaagaaatttctgggccgggcatcgtggctcacaccaaatcccagcactttgggaggccgaggcaggcggatcacttgaggtcaggagttcgagaccagcctgaccaacatggtgaaaccccatctctactaaaaatacaaaaattagtcgggcatggtgccacatgcctgtaatcccagctgctcgggagcctgaggcaggagaattgcttgaacctggggttggggggtgggggtggcggaggttgcagtgagccaagatcgtgccattgcactctagcctgggcaacaagaatgaaacgcagtctccmaaaaaaaaaaaaaaaaagaaatttcttcccattgacatccattcttctgggtgaaaaggggacacagatttaaagacatacaatgggctacatgtttttagagttaagtttcatagcagttgaggtgtatatgtgaaaaaacaatccatccttcagaagcagccccagtgttccctggggagacttcccaagcatgtccctgggctggggtttctttcctgtgtgctcccagcatccctgctttctacctcatttctgatgtggtacaaatcctgatctcccttccttttccttccctttccccttctgtcccctctcccccttctcccttttttttttttttcctttcaacagagtctcactctgttgcccaggctggagtgcagtggtacaatcatggctcactgcagccttgacctcccaggctcaaggcagtcctcctgcctcagcctcccaagtagctggaactaaaggcatgtgccaccacaaccagctggtctcaaactcctggacttaagggatcctcccacctcaggctcccaaagtgctgggattatgaatgtaagccactgctcccggccctgagtttctttactatagcacatcaggctgagatctctttgcaaactcagattgtagcctcagtgtttaggacaatacttgatgtgtagtagatattgaaccaaccaaagtgatgaattgcaccagtagttggactttgatgggcaagttcgtgactggtggtattatagtatcttttctgccccggttgatcattgtttgtttttctccttttctccctctaaagtactcatgtaatggaggaaagtctatatctgcagctggacccagccataccaggagtgtattttggaaatccatacccgtttgggattgatccggtaataatgtcttcttgggttaaatatttcttatgtgaactatcttgaggagacctctggagagagaagaaaaggccaacaaagcctgtcaaatcaacaaacttgtgttgagataaaataacttctgctgacgtttttgtgacacatagagccagagtcaagtaaaagttctgtctacaccttctacccagccccattttccatacagtcccccaaacgtctgcctctttctccatcartcatatccctggtggttaataaytgcttctttaaaaggcacttggttgcctggggagtatgcatattacatragctatttagcgtcctaatcaagtttaagttccctgctytgtattttcttgcagtgggaaacatttcccttttttctaaaaaagtgtggatttacttttatgtttgctttgttttactgcatagaattgacgctttttaaaaaaggtatttgcttcattttatgtttgttatatctatctcagtcagctagatttgagctaagcaaaacgatacttcctcgcagcctgtagatataaagsggttttgaggagatacaacacatgcccgttcatgtaaagctgttcatttctattggcccagtgcatgctgccaccaggtggcggccttgtgctccaaatgagcgtgagtagtctgaaattgaacctggcaaatgctgtccatgtttcttctaagctctttctttatgggagagaacctgagacctccgttttcgttgctgacaattaggagtaaatagtactagccctaaaactggtttccagtctctcccatcttacaggtcacctcctcttaagttttcctgtgtcattccgctatcgcccgcctccctgcccttataaaaacatgaattttgcccaggatttgtttatacttgccacccagggacacttgcattctaagttttatcaaaagtggtaaagtccttgaaggctggtgtgtaagttgcaaagtgctaaaaactaatttgaatttttgtggcctgcaagacgttgtccttggtcaaaggaatttcatgtttagtaagcaggtggagaaggaatctagacggggatgatcttagggtctggttgatcttcctttgtttggaatctcattgctccaatggtctcgtctctcccctccacagcccacagttaattcatcagcaaatcctgcctgtccatttctgctcctcagacagagtggagctacggtatttcacattgcagaactgagtgatcctgagtttctactctgatgcaattttgtcatctgcccacaagttagaaaagaaagaaaatatgtcagggtgaaagagaatgtgggatattgaaaataatgaaatctgttcctagtaacatttagaattttgaaaatttctggtctttctatcctaaaataatacatatatatgatttaaaaaaatctataccacacaaaatattatataaagaaaagcaggagttggccagatgtggtggctcatgcctgtaatcccagcactttgggaggttgaggcgggtggatcacttgaggtcaggagttcgagaccagcctggccaacatggtgaaaccttgtctccactaaaaatacagaaattagctgggcatggtggcayacaccagtagtcccagctacttgggaggctgaggcaggagaattgctttaacctgggaggtggaggttgcagtgagctgagatcatgccactgcactccagcctaggcaaccagagtgagagcccatctcaaaaaaaaaaaaaaagtaaaaataccaaaattagccaggcatggtagcatatgcttgtgatcccagctactcgggaggctgaggcaggagaagtacttgaatctgggaagcagaggttgcagtaagctgagatcacaccactgcactccagcttgggtgatacagagagactcttctcaaaaaaaaaaaaaaaraaaaagaaaaagaaaagcrggagttgcctttcctacctctccagttcctgcagtcctgttcctcagagataaccactttaacagaacacgtctgtattagtcccttttcatgctggtgataaagacatccctgagactgggtaatttatraagaaaaagattgtgtggggaggccacacaatgatggtggaaagtgaaaggcacatcttacatggcrgcaggcaagagagagaatgagagccaggtgaaaggggtttccccttataaaaccatcagatctcatgagacttatgcactcccatgagaacagtatggaggaaaccacccccatgattcaatgatctcccaccagcttcctcccacagcacgtggaaattatgggaatacaattcaagatgaaatttgggtgggacacaaccaaaccatatcaatgtctgtgcctatgttagtttgtatcatatatatatatatatatatatatatatatatatatatatatatatatatgggcttactttttacataacacaaatttctacagtgcatttactgactgcgtttggcatctatttgtgaatcaaatcacaaaatatttggccttcatcatagcctgggctcttaacgcaggaatcagaytgcctgtgtttaaatctttgcttttctatttacttgctctgtgagtttgagcacgttaacatctctatgtctgtttcttcacctataaaacgcatataataacagccctaggccgggcgcgatggctcacacctgtaatcccagcactttgggaggccaaggcrtgcggatcatttgaggtcaggagtttgacaccagcctggccaacatggtgaaacyccatctctactaaaaatacaaaattagctgggcatagtggtgggtgcctgtaatcccagctacttgggaggctgaggcaggagaatcgcttgaacccgggaggcagaggttgtagtgagccgagattgcaccattgcaccccagcctgagcaacagagcsagactctgtctcaaaaaaataaaaataaaaataaaaaaaacagcagccctaactcctaggattgcttggcaaatgaaattatgtttacatgtaaaacygccagaacagagtcttatgcacaaacgtggtaaatgctccttgaatattagttcctcttatgttatttcttcctaggtatgtaagtaacttaatcttcctgaggttatgataaattaccttatctgtaaaatgagaataactatatctcatagagttttcagtagaactaaaygagataaacacatctaaattgcttagtatgtacttggtacttaactattaacattttaaaattttctttttatttatttatttatttagagacagagtcttgctctcttgcccaggctgtaatgtagtggcatgatcatggctcaatgcagcctcgacctcctgggcctcaatctccctgcttcagccttccaagcagctgggactacaggcacgtgccatgccatgctgggctaatttttgtttgtttgtttgtttgttttgagatggrgtttcacttttgttgcccaggctggagtgcaatkgtgcgatctcggctcgccacagcctccrcctcctgggttcaagtgattcttctgcctcwgcctcctgagtagcygggattacaggcataagccaccatgccatgctgggctaattttttaaaaaagcttttgtagagacggggtctcactttgttaccagcctcccaaaatggtaggattacaagcgtgarccactgcacctggccarcatttttaatgtgtcagatttggctgggtctaaagtgtactagcagaccygccctcactgcattgagtgtgcctgtgggaactgtccaaacaggtgagcaaggggaatgccgagggctggggcaggcttggtgccacttagatgccaargcccatgtgagggtagaggaggcatctctggggtctgggcacctgttattgaagtcccttctccccgcttcccagcagccgsctcctcagtgggtgcccctctggcctggctcaggacattgcaaaggaaggatcagtgcaaattagcacctgactgtgtgagcacgtgtgtgtgtgtgatggagggagcgagatgattgtgtctgaggttgtgtctggttggatgttggcsccttaacagaagcaaagaagtttggaggaggaagtcatttagcagaaaaggtgagaaagccattgtgcccttgtcgcctttgacatgtcccagagcaaacctgaaaacaatttgggatgtacctcaagtacaggtggggacaggsgaaggagcaaggacttggaatcctttccacagagtgggagtggagaccatggggctgccgagatttaaatggggaagaygaatattagtgactctggtccttagcyagtgtgagaccctaactaacccctccacccaccagccccctgcacgaccacccagtgtgcttttcctcatgtcagtatcatcgatatcatttggggcaggacaggtacacatgatccccacctggcagtgctgtttaaaatgggccatgtagaaggcagggactgtgtcttaygcatcgtgcttgcaaagattggctacaggaacggcttcttgagaaaggtctggggaaatgctttgtaatgcgaagcactacagactttcagagtaagaggtggtgttattaaaaaggattggatacattcatgggccaatgagctataggccatgattaaggaaactgaggcaagtttgagatcttgccgtaatggctcagattagctttcctcttttttttttttttttttttttgagacagagtcttgctctttcgcccaggctggagtacaatggtgcgatctcagctcactgcaacctccaccttccaggttcaagcggttctcctgcctcagcctcctgagtagttgggattacaggcacccgccaccatgcccagctaatttttgtattttggtgtagagacagggtttcrccaggttgaccagacyrgtctcgaactcctgagctcaagtgatacacctgcctcggcctcccagattatcttttcacgtaggatttttctcccctgtttccttccagcaatttgataatagcactaatgatcctgttacttttgtcattaaagttgcatttataaagggtttcatccttttttcctttttggactctaaaatgtatgcattgagctggactgaaatatgaaagtgcagttcccagagcggtttgctyagggaaagttgtgctgtagccctcaactccagtagaacttctaagactctctctcacttggttttttgtcccatttcccatccagatttggaacttggcttcaaacaaactcacatttctgaactcgtataaaatgaagatgtcggtgatcctgggaattgtccagatggttttyggtgtcatcctcagccttttcaatcacatgtaagtttcttgatgcactctctgcctgctctgtctgatcacactgatgatgaatggtgacagagccactggtttgggaactgcatctctctgtgcaagttttcttcctatgaggggtacttccctgggcatctgggcttgagccaagacaagctggttggctggaaatggcagcacctccgtttctcctgagcagagwctctccaaggtaagtgctcctctggccccagaaatatttgagggttcaaaaaaagactggaggccaggtgcggtgtctcacacctgtaatcccagcrctttggaaggccgacaggtggatcacctgaggtcaggagttcaagaccagcctggccaacatggtgaaagcccatctctastaaaaatacaaaaattagccaggcatggtgtcgggcacctgtaatcccagctacttaggaggctggggcaggggaatcccttggacctggaggcagaggtggcagtgagccaagattgtatcgctgcactccagcctgggtgacagagtaagactccatctcaaaaaaaaaaaaaaaaaaaagagaaaccattcttaacttccaggctgtacagaatcagatgatagtctccattggcctgtgggccacactktgcagacccctatcttagagcattcttaggaaaaagcttccargtccccattatatatcctcttgcctttaaatgtgcaactctgagctaggtctgcatgcgaagctgtagtcagatcaccaccctctctgtgtgggcatgacctttgctttagacgttacttctagaccrtggttctctctgactcttttgtgcaaaagcactttccagtatttcctttcaattttcttttctatgcatccatacaggattgctgtttgctgggggggtggggggtgccgttgtttgccagtagtgcaaaaaaaaaaaagatagaacattttgtgcttttgtgctttgagagaataattaagtcctaaygttcccttgatgttctatcttgtgtatgtgtgtgtcttccacccccagatacttcagaagaactctcaacatcattctgcaatttatccctgagaygatttttatcctgtgtctgtttggatacctggttttcatgatcattttcaaatggtgctgctttgacgtccaygtatctcagcacgcccccagcatcctcatccacttcatcaacatgtttctgtttaactacagtgactcttccaacgcacccctctacaaacatcaggtatttctgctatttttttttttttactcttcttttatttacttgattatgtcaaatttctctcctactctttttttttttttgagaaagagtcttgctctgtcacccaggctggagtgcagtggcgtgatcttgactcacygcaacctccacctcctgggttaaaacgattttcctgactcagcctcctgagtrgctgggactacaggtgcacgccaccaygcctggctaatttttgtatttttagtagagacaggatttcaccatgttggccaggctgctctygaactcatgacctcaagcaatctacctgctttggcctcgcaaaatgctgggattacaggtgtgagccaccgcacctggcctctctcctactcttgagtgttgcaaagagtagttatttgtaaaactgagccatcttggcatccagtggagggtgttacatcctttacatctcaaaagkgtcttattaaatgaaggtgcaagcactgagggctatagtgtggctccaaccattcttgttggggtaatacatgaaagggataattgcagagggattgaagattgtcttgtacattggctatgaagaaagaaaaaaaaataacccttcaaattgttaggcttgcagctgtagaatgttctatatggcaccttaatacttaataatcttttattcaaagagtgaactctagctaaattaacaagaataataattgaaatagaatcagaagacaaagccctgtattcacatgggcagacagtttctggaaaagcacgaatcaaactcatgctcttctgtgagcttccaaagctggcgggagctgctgttttcattttttgctcctcttccagagacagttcatcccaacagttgcactttattgccactctgatttcttccatttcttttagcctcattatcaacttaatattttatttatttatttatttatttatttatttatttatttatttatttttatttttggagatggagtcccactctgtcacccaggctggagtgcagtggcacgatcttggctcattgcgacctccgcctcctgggttcaagtgattctcctgcctcagcctcccaaggagctgggattacaagcacctgccaccaggcctggctaatttttgcatttttagtagagacggggtttcaccatgttggtcaggctggtcttgaactcctaaccacaggtaatccatccacctcagactcccaaagtgctgggattacaggtgtgaaccaccacacctggccaatattttatttttaaaaggtatacaaatcctattggggctggatataaaaataactcagtgagtaattctttgatgacacaaataacagtagctttttccccctggcctctcccagtgattaacctgatcatattatctgagggtagattttcactaaaaaagacccatttctataggtcctgattcctctggatgaagccctgtgactagttccacaaggccagctgcccttcagtgcagaggttgtctgttggggattgcacccatcagatgtcrtagttaatgtcatgcttctayggccaygccccttctcatgagttcagttcctagttgtgttctctttccctacccaagcatcaataagaaaaagaaaaggctgggcgtagtggctcacgcctgtaatcccatcactttgggaggccaaggcaggcagatcacctgaagtcaggagttcgagaccagcctgcccaacatggtgaaacaccatctctactaaaaatacaaaaaattagctgggcatggtggcaggtgcctataatcccagctactcaggagactgaggcaggagaattgcttgaacctgmgaggcagaggttgcagtgagccaagattgcgccactgcactccagcctggacaacaagagcmaaactctgtctcaaaaaaaaaaawaaaaaaagaagaagaagaagaraaaatgccttgtaatcaggttttcataaggagtgagtgtagataagaatcagaaacaggtgcattactgttgggcaccattttgttatcacagatggtaaccatgagccatccccagaatgttgacatgaactgaacgtattttgaaggttcatttactcagtgctggatctaaacaaacatttrtttggatttcccaaataactcttctgttttaaggcagagaactcagattcaccaaaatagttcgtgtgctaactgctttcattaagactgaagtcctcacttagtctggaataagcactgagcattgcacagtgaatgcgtggcttatccaactttttttccattcaaaagcattatttggagttggttggttttcacacaccctagtgtgaagattaattgtcttgatacagtttgaagttttcataayctcatttcggggttatgcagctggaagaggcaatacaagttaataaagtcccttcccaacattgtcctggctgtctttgaatatcaaaggatagcyacacacacacacacacacacacacacacacacacacacacacactcatcccrttgctttgtacgtcatcgggggaaaatcctgttgcataaaaatggacaaagggccatgagacagcattgtgtgcgggtactaggatggataagttcagcttgggttcacatggtctcccttcctcttttggacatttaaaagtagagtgaggccaggcgcggcggctcatgcctgtaaccccagcactttgggaggccgaggcrggcggatcacgaggtcaggagatcgagaccatcctggctaacacggtgaaaccccgtccckactaaaaatacaaaaaaattagccgggtgtggtggcacatgccggttgtcccagctacttgggaggctgaggcaagcaactcgcttgaacccaggaggcagaggttgcagtgagccaagatggcgccactgcactccagcctaggcaacagagcgagactccatctcaaaaraaaaagttgagtgaggatggaagatggaaccgataaagtgttcactctattatcagggggaatcttgttacaattgggataataaattgtctcctggcatttactgcgaccttggtcagaatgcttggagaaacgtgaaggctcaagaaatgtttttctatttccttccagcaccgtgctctcaatccttctcagcagccctgaccgagccttccgaggctggctggttcttttgaccatagcagctatgagtcactcctctaaactggtcactggggtgtgtataagaaaggaggcaggggcgtgaggatgtgaaaggtgatctggagcaggaatataacagggactcctccagggtttcagcagaggcctgaagaccgcagctgcctcactccaaagggaaggcgagagagaccgagagtgagttcaaagtgggtaacccagagcctgttgagtaaattgcccacatggaagggatgaaagtcaggtagcgatggtgaggaacttcttttttcttttttaagagataggagcaagagagctcagataattttctaggactcaaaatataaaattaccggttgaatactgtttgtgacttaaagtgacccaaggacttttgagtaccaccgagtgactggtaaagtcatgaggcctgccatagttttcatgcaggcccaggtgaaaacgacccccatgggacagagttcaagacaaggggtgcctttataatgtttcaygcgtacttcttgtttaaaagattggttacgtatggtacaagggactactcagaataaggaatacagagagtttccagtgtctaccccgtgtcgaacatttggaaacactggacagatatttctctatctgcaaggggaatattccaggygtgaaggtgaatggattcattgaaatgctttagatctctcaaaataaagtgctagtgaagtggcccatagtggtcattttcatcacgtaaagtgtgctgttctgccatgtgaaaatgatgagatctcgccattttggtcttgcagcaagaagtccaaagtttctttgtggttatggctttgatttctgtgccgtggatgcttctgattaagccgtttattcttagagccagtcatcggaaatcccaggtaagggctgtttgtttcagttcaccctactttgcataagaatgtgggtttctggaaagatgaatcttgggtttagagagaatcgtcctgggctgccagggccagaagaatggtgttgaggaactgacccgccctgagtatgtttcgttctgtggagctagacttttccactgggccgtcttatttccaacgagatgctctattaagggcaaacacgtttaagccttatgtctcggctggtcgcagtagcccacgcctgtaatcctagcactttgggaggccgaggcgggtggatcacctgaggtcgggagtttgagaccagcctggctaacgtggcgaaaccccatctctactaaaaacaccaaaattagccaggcatggtgatgggtacctgtaatcccaactacttgggaggctgaggcaggagaatcacttgagcccagggtggtgggggagattgcggtgagccgagatcacacttcactctagcctgggcgaaagggcgaaaaaccgtctcaaaaaataaaataaaataaaataaaccttatgtctgacagactttgttcagggtgtatgtgtgctgagtctcgtggtagttaatgatttataagggtctgaatgtggttgttttattagttataaataatattttattatgattttacttttaaaacaaatattaaaagcttttttcattaatattctaaagttgtgagactttactgtattatgttacagattgtgtcagggaattagaagagtaaacaaattcaattaggtcagtttttgtttgtttgtgatttttcccctgttgccaaataccaggttcagcccactttctctttttgtctaaactgcccctgagccttagatgtactaggggggtgaagcagagtttaatatcagcctgaaccaaataggatttagtaagattaaccttccagaggacatcagcgtctagctctgacacacagacggtttgagatggtcgttctctgctttcctctattagtgcaaaagattaagcggaatgtgctgagacygtgtatgttttaaatggttgtagatatgttcagattaaattctatttttctgagatctttgttggatattgacctggacaggcagcagagtcagggacctagacatgacgagacttgagttcaggaagtttgtccctatgtgacgctctgtttctctgtcacctgcctctcctcccactgtctccttatgccagtccgaactcgttccaaagcttagctgaaacgtaatctatatgaggtattcataaagaggaagacaaagcaaggaagacttggttattgtttggttaactggtgggagagcaaggtggttgagggttgttgaggtgggtgcttgtccagacaggtgaccaagtatttcaaagagggtggcaaatacctgtttggagaagtagatgcaagttttttttgttttgttttgttttctagagacaaggtctctctctgtctctgaggccagagtgcagtggctattcaccagcacaatcatagctcactgcagcctccgactcccgggctcaagccatcctcttgcctcagcctcccaagtaacaggcatgcccccctgcctggctcagcatttttttttttttttttttttttttgagatgagctctcactatgctgcccaggctgctctcaaactcatggcctcaagtgattgtaattttttttttctaggaactaaatctgtccataagccaagagccaggttactgcaggctctcctgagttcsaggactgtaaaatratagcttgtcttgctctttgtaccacacaagctctttaaatagttgctgatctcaaagtggtagatttctcctttgcgccaccagatgacttaaatagagggaaggagggagagagggttttcctagtctgccttcatggatgatagctctgaaactgactggtaacaggagctcctgaagacggcgtggaggcctgttcccttggcccttgggatgcacggctgttggttgtttcctcaggcggctgcttagggtccttttcgtgtcggaaacattaccacctccrttcaagagatggtcctataatggcattatttgccccttctccacctctccttcatgaaatcctacagacctaatacataaacaatttgttctsacggacttcaggtgatatgaacaggggtcctgtctattagcctctcctacaacctgggtccctgcagaatgtggcctgggaacctctccactagagggccgcctgtggcgtggccctggtgacatgccccgtgggcagcgagtgagtacacatctccttccgagagcccttgtggccagccaccaggccccccacgttctgtttccccttctgacttgctgctatgaacccaggtccccccatactcccacatctcaggtcacagtgaaataactgtgtgtttctatttaaaatcttcggccgggcrcggtggctcacgcctgtaatcccagcactttgggaggccgaggcgggcggatcacaaggtcaggagatcgagaccatcctggctaacacggtgaaaccccgtctctactaaaaatacaaaaaattagccgggcgtggtggcgggcgcctgtagtcccagctactcgggaggctgaggcaggagaatggcctgagcccgggaggcggagcttgcagtgagccgaaattgcaccactgcactccagcccaggcgacagaacgagactctgtctcaaaaaataaataaataaataaataawcttcatttcaacatgtgcgttttttatggttaatgttattgaaacatataacatacagacaagtgcatgaataacgaggcaccaatccatgaagtatcgcagcatgaacacgttcgtgtcaccagcacttaaatcgagaaatgggtcatccttagaacttgagagtcctgaccgggcacagtggctcatgcctgtaatcccagcactctgggaggctgaggcaggtggattgcctgaggtcaggagttcgagaccagcctggccaacatggtgaaaccctgtctctactaaaaatacaaaaattagccggcgtggtggtgagtgccttataatcccagctactcggaaggctgaagcaggagaattgcttgaacctgagaggtggrgatggcagtgagctgagatcgccgccattgcactccagcctgggcgacataagcgagactccgtctcaaaaaaaaaaaaagttttttktgccttcttcctgtcactcttaccccaagagcaaacattgtgctgacctccaggactgtcagttcgttttgcctgttcttgaactgtatttaaatgaaatcatccagaatgtcttctttgggatctatcttctctcatccaacattgcagtgttagtaattacaaatggtgatactataaacatccttgtatatatcttttggcacatgggtttgaatttttatttattttatgtatgtatttttagatagggtcttgctctgttgcccagattggagtgcagtggtgggatcatagctgactcacctcctgggctcaggcaatcctcccacctcagcctcctgagtagctgggactgcaggcctgcaccacaatgcccagctattttttaatttttttggtagagatgaggtcttgctatgttgcccaagctggtcttgaactcctgagatcaagtgatcctcctgcctttgcctcccaaagcactgggattgtaagtgtgagccactgtgcccagccacatgtgtttttagaaagttgccagtagctaatttacaatgattgctrtatgttttatttcatacgccacccagcttaagcattgtgcgattttagtaagaggactgcaagtaagtatctggaaggaagatagtcactaggattcacaagtccagtatcacacttctacaaaattattcatgttcattttaactaattcaagaataatgagcagaaaagggtagagtttagggttggaaatggagaaaccgtaatatatctctcctttgatattttcttctataagttgaaggagagagaaaataggatttcgagatgacaaayataaagttaacttgagccacgtccctccccatgggataaagaaccacaaggtgttggggacagcctaacctagaagctggctcttggcacctggcaccctggactcttgtctagatggacctgagcccacttctgggtcctacagaggccttgttcctcagtctcctgagggcagaccaggccactggcatggacaccacgagtccctgggtggccaaggggcagctgtctgtaggsaatgcgagcagaacttagacattttgggtcagggtgtctgtgtgcacatacaaggccctcatgatataggatgaagccagaggtgaaaaaaagagggctccctggtccagggccagctcccatgctgccatggcatggcgtgaattctgaatttcaacatagccttcccagtttttacaaagatttattttttaagctagaacccctatacacacactttttttttttttttttttttgaggcagagtcttgcttggtcacccaggctggagtgcagtggcgcaaacactgctcacttcagcctcaacatcccaggctcaagagatcctcctgtcctagcctcctatgtagttgggacaggtgctccctcagccaggctaaattttttttttttttttttttgagagatgggatctcactttgttgcccrggctgaccttgaactcctaggctcaaacatgaaacatattttatttaggaatttgttggcttgatgtataacttttaaatatttcaacctatggcatgtgaactactgtctttgctcttgcccagagccctgcaaatgttaagtgcagacctgctaaagaaaggagggccctggctgggtgtggtggctcacgcctgtaatcgtagcactttgggaggccgaggcaggtggatcacctgaggtcaggagttcgagatcaccctggccagcatggagaaaccccgtctctattaaaaatacaaaaattagctgggcgtggtggtgggtgcttataatcctgggtactcaggagagctgaggctggagaatctcttgaactgggggacagaggttgcagtgaaccgagattgtaccacttcactccagcctgggcgaaggagcaaaattccttctcaaaaaaaaaaaaaaaaaaaagaaaagaaagaagggtccagatacgttgatgcctaatttgcaatacccctcccatgaaatcattctagaaaaactttggacatgggacattaagcttcatggtgacttgaaagaaatataccattcacacttaggggtaaaaccagaccaagttgaatggtgactatgcctagatttttttttccttgaatttttcctaagctatttttatagttaatttcacaaggctacatggaaggtacgactgatgatttatgaccatgtgtatttcttttaacaatggaaaggcacttttgtacttgcattgctttagtgtcaagactataatttggcacattctggagcattgtggagaaaaagcacatgcactggagtcaggcaactgagtttgaattatggctctgccacttaccagccttgccagctgtatgatcttgggcacatatttttctttttttttttttttttttgagacagtctcactctgtcccccaggctggagtgcagtggcacaatcttggctcactgcaacctctgcctcccagattcaagcaattctccttcctcagcctcccgagtagctgggattacaggcatgtgctaccatgcccaactaatttttgtatttttatggagatggaatctcgctatgttgaccaggctggtcttgaactcttggcctcaggcaatcctctcaacttggcctcccacagcactgggattataggcatgagccactgtgcctggcctttaacttttttttttttttttttttttttttgagatggagtctcactctgtcgcccaggctggagtgcagtggcgtgatcttggctcaccgcagcctccacctcctgagttccaatgactctcctgcctcagcctcccgggtagctgggattacaggcatgcaccaccacgcccagctattttttgtatttttaatagagacggggtgccaggctggtctcgaactcctgaccccaggtgagccacggtgcctggcctaatttttgtatttttagtagagatgggttttcaccrtgttggccacgctagtcttggactcctgacctcaagtgatctgccagcctccgcctcccgaaatgctgggattacaggcgtgagtcaccacacgcagcygggcacatttcttttctttttttatttttattttattttatttatttatttttttgagacggagtctctctctgtcgcccaggctagagtgtagtggcacaatgtccgctcactacaagctgtgcctcccgggcacatttcttaacctttctgtgctgcagcttacttctctagaaaatagggtgataattgtgcttatataaaatggttgttgtgagggcttaatgagatagtgtagtgtttagaacagtgtctggtacataggtagtatttgaggagagcctttatttatatttatatgtgttasaattctcagggtgagttgagcgcattcctcatttccctgcttgttgtcagctgcaggcatccaggatccaagaagatgccactgagaacattgaaggtgatagctccagcccttctagccgttctggccagaggacttctgcagatacccacggggctctggacgaccatggagaagaggtatctgggacgagagcccctgaggaagactccccagtttgtacaaattctagaatggacataggcagtagagctgggtgggtctggagggccccacggggcagtagccctgtcactgctgagtcctgggaagctgtgaaggtctcagggaaggggacctactagctagtctaagaggatcagaacagctatttagcaaccaatctgggcacattttaatatttctagtccaagtacygctgcatctgtatgtgtcaggtgaatatcagcctcrgatctagtgacatagaaggtcctgcgtgtcactgaggactccttggctcagcaccacgcccctataagctctcttttttgtttgtttttgagatagagtctcactctgttgcccaggctggagtgagccaatttcggctcactgcaacctccgcctcccaggctcaagtgattctcctgcctcagcctctctaatacctgggattataggcatccgccactgcacccggttaatttttgtgtttttagtagagatggggcttcaccatgttggccaggctgatcttgaactcctgacctcaggtgatctgcctgcctcggcctcccaaagtgctgggattacaggcatgagccaccgtgcctggccccctatgatctctttataatgttatctgcctctcatgtgaattcataaattgttttgttccctcatccctccctgcccctgcctgtgcaaggacagccactgcccctcaggagcccgtgccacatcctcccagatgaaagcagctgtctgttccatgtgttgactgaagtcagccacatttgtgaatcccaagctggaggctttaaccggagctctgttctaatttgggagtgggaactgggtttccatgagggccacagatgctataaatggctccatttgtggtgttaattgcttattttaaaaagttttctcttgatagccatgtgtggtggctcatacctgtaatcccagcactttgggaggccaaggcgggcggatcacttgaggttaggagtccaacaccagcctggtcaacatggtgaaaccctgtctctactaaatatacaaaaattagccaggcatggtggtgagcacctataatcccagctactggggaggctgaggcaggagaatcacttgaacctgggaggcagaggttgcaatgagctgagatcatgccactgtactcccagcctgggygacagagcaagactgtctggaaaaaaaaaaaattatcttgattaattagaattaatgaaaaatctcaatcgtgaaaattcttcccaagaaaattctaggtacagagtgatccacagtagtggctgttgacattaccaagtctgtcagacttgctggaatgttttagaatccaacccacgcatgttctgactcctcaagtcctggcctgtccagggcaacctccctcatctcttctcctcctgccctcaatctatatccagacaatttccacctgccacctccaacatgagcaggctgcccttgcttgggcaactttagtcaccattcatggacctctttcccccaggtctaatcatacatgggtctcccgtctccaggcaaatgtgtgcctccccctgtttctctttcaagttccttgcttgcttctctccacggtagggttagccaaactcaaggttaagggtgcagtccttgactgtcacatctgcccaagactgatcccagccgcaagtytgggggttcccagggccaccctcacttcaggcaagctgactatacattcgcaggacccttagggtcctttggggccaaaatgactcacagaactccggaaagtgctatgctgacagttgtttttgttttttttttttgagacagagtcttgccctattgcccaggctggagtgcaatggtgcgatctcagctcactgcaacctttgcctcccaggttcaagcaattctcccgcctcagcctcccgagtagctgggattacaggcacccaccaccatgcctggctaatttttttgtgtgtatttttgtagagatgggatttcaccctgttggccaggctggcctttaactcctgacctcaggtgatccgcctacctcggcctcccaaagtgctgagattacaggcgtgagccaccgtgcctgtccacttacagcttttgtagcaaaagaatttaaatcagacaggcagagaggatagggcagtatctgggacagtgagttccaaatgaggagctgtgtccttggaggcacattactgtccccacattgatgtgtggcaagatgtgcagagaatcgccagcctaggccggtcacccaagcttcagtgtccaaagttttactggagtttcctcatgcaggcaggattsactgattgattgactgatgattgattggtggatgcagccccagcagttgctgcagagtccccagctctctcccaccttgcagatcattcccaactctctaagcatgtggttggtctttctggtgtggccagaccccacttcaactataaggtgcccaactkaagccactgcattcgcataaacgatcaggtgtggtcccaggggcccagcatgaataacaaagaccctttcacgtgggaaatgccagtggtttagaggttacctcccaggagccaagacaaagccagtcctgttcggtaaggttaattatgattattataattactattttgagacagggtcttgttctattgctgaggctggcatgcagtggcacaatcatggctcacagcagccttgacctcctgagcccaagcgatcttcctgcctcagcctcccgagtagctgggaccgcaggtgcatgccaccacacctgcctaattttttgaatttttggtaaagatggggtctcactttgttgctygggttggttctgaactccttggctcaagtgatcctcatgcctcggccttccaaagtgctgggattacaggcatgagccaccacacctggccaagatgaattctttcttatgcagttcttctttaccttgactctttctacctgctcactccatctctgcccatccctgtcccttcaattcctcacagctgctttcattgctaaattgaggttctcatttttatcttgtccccataacctctgacatcagtgactgcaccgccattccttcctggrygtctccctccgcagacatccgtgactgcaccmcccccccccgccccgaattccttcctggacgtctccctccgcagacatccgtgrckgcaccyccccattcctccccattcctccccattcctccccattccgccccatgcctctccggatgtctccctccgcagacatcggtgactgcaccacccgccccattccttcctggacgtctccctccgcagacctccgtgactgcaccctccccgccatcccccccattccttcctggatgtctccctccgcagacatccgtgactgcacgcccccccttccttcctggacgtctccctccacagacatccgtgactgcattccccccttccttcctggacgtctccctccgcagacatccataactgcacacacacacacacacacacacacacacacacacacacaccgccattccttcctggacgtctccctccgcagacatccataactgcgcgcacacacacacacacacacacacacacacccattccttcctggacgtctccctccacagacatccgtgactgcatccccccttccttcctggacgtctccctctgcagacatccgtgactgcacccccgccccccattccttcctggacgtctccctccacagacacccgtgactgtacccccccactccttcctggacgtctccctccgcagacatctgtgactgcagcgtgactgctctagcttctttgatcttttcttttcctcatcagtttcttgttttgttatctcatctcactctttttttttttttttttttttccgagacagagtctcactgtgtcgcccaggctgcagtgcagtggcaagatctcagctcactgcaacctccgcctcccgggttcaagcgattctcctgcctcagcctcccaagtagctgggactacaggcatgcgccaccacccctgtctaatttttgtgtttttagtagaggtagggtctcaccatgttggccaggctggtctcaaactcctgacttcaagtcacccacctgccttggcctcccaaagtgctgggattacaggcatgagccaccgtgcccggccttgttttgttatctctgaatgaagatgtttcccaaggctgggagcgcctctttcttttcttttctttttctttttctttttttagacagagtctcactctgttgccaggctggagtgcagtggcgagatctcggctcactgcaacctccacctcacaggttcaagcgattctcctgcctcagcctcctgagtagctggattacaggtgcacgccaccacacccagttaattttttaatttttagtagagacgaggtttcaccgtgttcgccaggatggtctcgatctcttgaccttgtgatccacctgccttggtctcccgaggtgctgggattacaggcgtgatctcctctttccttgatctttcccttgttgatctcctccatcctcctgcagatgcagtctcaggagtccgtttccagccgggacttttcttcggggcttcggtagttccacctgagctcccatgtgcagagtgtctactgataaggcccactgccatctgaaactcagcatgtggagagccaactgcccacctcctctgtcaatgtcattcttccagctacttgggcttaggagcctcagagccctggctgccctggccctgagtgggtaaggggccttctctgtgttcccacgataccactgcatgccctggtcattgcgcttcccagagtgtggcatgggaacccttctacataytctcctgactagkctgtgagcaacttgagggcatgtacagcaccagtcaattgtcccccatggccaggcacrgtggctcacacctgtaatcccagcactttgggaggctgaggcaggcagattgcttraggccaggagttccagaccagcctgggcaacatggtgaaaccccatctctacaaaaaawacaaaaattagccaggtatggtgatgcatgcctgtagtcccagctactcggtaggctgagatgggaggatcacctgaacctgggaggtcaaggctgcagtgagctatgattgtgctactgcattccagcctgagtgacagagcaagaccctyccccccccamaaaaaaaattgtctgtcacatcagagagcatgaggggagaatgagctatggctgtcttcttcgttctgttatttacttctttcctgtgttactgagctcataaccmaattgtccytttttttttttctttaaggctgtcccttctctaaactrtgatgctaccagagtaacctgcctctatggctcctcactgaatccaggttgtttcttcaactttacccatagcttgcctttctagaaacttccacacaggaggactgtcttctattcctcacctaaacaagctcccagttccagccaaattgttttctttccgacttgactaggtgatattcccagctacctgtttctttcccaaccagggatccttttgctcctcaggaacaatttcttgtccttcaagtcacattcctacccagccttcctggcacagcacaaatctcatctccccttaccacccakttgtcatctttgagctttttttcagctattgctggggaacgttaagacacacataacatacractttgtgctgataattctttctctaagtctattactatttcttttcccctagttagactgaaagtgtctgaacagcaaagcccatgtcttattcatctttgcatcatttggaataacttttgtgtagaaaattctcaatgaagtaaaataaacaattccgtctttcagttcaactttggagacgtctttgtccaccaagccatccacaccatcgagtactgcctgggctgcatttcaaacacagcctcctacctgcggctctgggccctcagcctggctcatgcacgtgagtgagcagcccatcggggggacagtcagctctccccaacaccccaggaaataggtgccatgtatttggaagtaaaggtgacttctccgagctatttgtggatgtttgccaaaagaatgactcttctttcccaggcacaggtgccttttctgtgggtctggctgcacgttgctggggtggtcaccctctatattaatagtctcctactgctgctgtaacaaattgtcacaaacactcgtggcttaaaacaacacaaatttggccgggcacggtggctcacacctgtaatcccagagctttgggaggcagagtttgggcgaattgtttgagcccaggagttcaagatcagcctggccaacatggtgaaacccgtctctactgaaaatacaaaaattagctgggcatggtggcgggtgcctgtaactctagctactcggagactgaagcaggagaattgcttgaacccggaaggcagaggtygcagtgagccgagatcacatcactgcactccaccctgggctacagagtgagactccrtctcaaacaaacagacaaacaaaaaacccaacaacacaaatttggtgtcttccagtttttgaagccagagtcctaaaatcaaggcgtgggcagccgtgctcctgctgcaggctgcaggtagaatttgtttcctggcctttccagcctcttgaggctgcctgcattctgtggcttgcggctcctctttgcatcacttcaacctctgcttccagcatcaaatctcctttttctctgactgtgactctcctgccttcctcttacaaagactctagtgatgacattgggcatatccagataatccgggataatgcccctctgtcaggattcttggcttaatctcatctgcaaagccactgttgccatgtratatagtatgttgacaggttattaggattagaattaggatgtagacatctttggggatgggggaacatattttttcaggctaccatgcccttctgcaaggtgctgacctttaagagaacrcctgccttggttatgagcattgcggggagtcagttggctgcctgctgagctgaccctcaggaagtgctcaccacctttgtgaattcacagcagtccaggatcagtcrggcyaggcccagaaatacaattgtatctatctatctatcatctgcctgkctgtctgtctgtctgtctgtctatctatctatctatctaaaagagacaaggtctcactatgttgcccaggctgatctcacactcctggcctcaagggatcctcttgcctcagcctcccaaagtgctgggatttcaggcattggaaatacagttttgataaagatccgagcccctggggttgcctaacgtcaggaatcatgactcaccaactcacttgtaagccccatcttgatctctgggtccttctccagtcttgtttcttgtcagttttccttagtgccccagcrctccasacccatccgtttcatatgcagtggccctgaggagcgttttttttttttttttcctaagacagggtctccctctgttgcccaggatggagtgcagtggcgctatcacggcctcgaactcccaggctcatgtcattctaccgcctcagcttcccaagtagctgggaccacaggtgcatgccaccatgcctgggccaattttttttttttttttttttggtagaggtagggttttgcctttttgcctaggctagcctcaaactcttgggctcaagcagttctcctgtcttggcctcccaagtagcagggactataggcacacaccaacatacttggcgaacttttttttttttttggtagagacagggttttgccatgttgcccaggcttgtcttgaacttctgggctcaaacagtcctcctgccttggcctcccaaagtgctgggattacaggtgtgagccattgtgcctggcctgaaraactatctcctgaagacgcagtactccctgggcccctctgtgtgtttgcccctgcagcccccttgcctgaaatagtcccttctttaattctctctctatctgatatttaattcgtccttcataactcagctggaaatcttctttcctagtcccccagtctggaagatgccttcctgtggttctggggcatgctcttaacctagcttcaattrtaattgtcttgattagcctgtcttcctactggactatgagctccttgaaagcaaagaacctgacttttatcttagcattcctggcactgagcataawgcctagaacagagaagccaggccaaggtgtgtgctgaagggatagaaacgaaactccagtactcagcattcgtgtgatcttcacagctcagctgtgttcatttcctcccacaaactcacatacacacactttcacatgcacatgaacgctgatgcacacactcagccctgcaagtggctgcagcacagacacccataagcatatctttttttttttttttttttcaggctggagtgccrtggcgtgatctcggctcactgcaacctccgcctcccaggttcaagcaattcttctgcctcarcctcctgagtagctgggactacaggtgcacaccaccatgcccagctaatttttttttttttwaatttttgtattttcagtagagacggggtttcaccatgatggccaggatggtctcgatctcttgacctcgtgatctgcccgcctcggcctcccaaaatgctggaattacaggcktgagccaccgcgcccggccgcatgtctttactcctgtgcactgctgtgcattcatgtgaagtggctgtcccaggactgtcacctacttgttccttagagtggatctcagcgcttcgtgcagtcagtggtggtaatgttggtcttcagctctaaccccagcagtagttggaggacttgagtcataatagggctgagtctagataagacaggaggaggagttttggtattcttggccctatgtgtcggggtgtcctctggccagcccatacacacactgagggggtcatttgattcctaaaaacccatatggttcatggctgcctgccctgattcacccactgggtcattctagaagtccctgctagacgtggctyccagtccataytaacacagttgcttaaagaggtaatgtggaaaaatggggaaaaaattaaaacactgacttaarttctggttccttttctaccacttttggytgagtaacttatacaagaaatttaacctttgtgtgccggggctttcatcagtggtcctagtagttagcctcctgcactggtcaggttaggctaaactctgttgcaayaacaacttaccctctaaatctcaggtccctaggccagagtttggcactatgtgttggggtgtcctctggccaaaattcctcctgtcttatttagayccatccctggtatgacccaagtccttcaaactactgctgaggttggagctgaagaccaacatcaggaccacggatgacttgaagcgctgagatccactttaaggaacaaagtggggcygggcrtggtggctcacacctataatcccagcaytttgggaggccaaggtggtggggggattacctgaggtcaggagttcgagaccagcctggccaacayggtaaaaccccctctctactaaaaatataaaattagctgggtgtggtggcacaygcctgtaatcccagctactcgggagggtgaggcaggagaatmacttgaacctgggagctggaagttacagtgagccgagatcacaccactgcactccagcctgggtgacagagcgagactctgtctcgaaaaaggaaaaaaaggaacaaagtgggtgacagtcatgggatagccacttcacacgaatgcacatcagtgcacaggagtaaagacatgctcatgggtgtctgtgctgcgggtacacgcagggctgagtgtgtgcatctgagtattcgtgtgcacgtgaaagtctgcgtatgtgagtttgtgcaaggaaaygaacatagcctgagctgtgaagatcacacgaatgctaagcactggagtttctactgtaaatctcaggtacgggtctaacccgacgggggtgaagctgctcccattgatgaaagactctgcatcactgtagcaggcagaaaaccagatcttgggggrcagcaagcaaataggggtcctcttccttgcgttccatgtctctgcktttatcatgttctgatagccryttgcaagtggcaggcctgtgtctctctgggctacatcattgtgaccttttagcaggggccttcaaatctcaagccaaggatgtaatgatgctatttccctgcaaggtgcatrtcccaggctgttgggcatgataactagggaagaagcattcacaygtgctctgtgaccagggacacctaagcatggacccttacttgcataggttggacagtgagagcccttgtagggcagttagctggggacacggrctcagctacgagtccgggttttttccgatccccatccatgacctccctcctcttggatttcactccyctcagggccttttaaaacattccccgactgtcagcctttgagagactccrtgggcatgtaagaaatgtgtagaaaagacctttagagctgggggtgtgggaaacagctgaggaggtaacgggtagggaagtgggggtggggggacggtggtgtcataggaacaggccagagggggctgtgtggcatttgcccctgaacttttcggaactttagtttccttatctatgagatgggcatcataaaacctaatttatagggttgatatgggccttactgggataatatgtgtaaactgcttcgaattcctctgacttggctcttaatttggagtctgtggctgaacttcaggctttctgtaaatcccctgaaactacgtataagatgttgttgggcgtctctgtgtgcatttttctggggaaaggattcatgactttcttcagattccagaggggacccgtgaccaccaaagagtgaaaagagccactttcccgagtgaggctgaattcacctcctgtgctcagtacctggcatgtgcccttgtacattgcagtgactgaataaatattagctaaacgttttttgaaatgtggttargatttcaatctttttaaaaacatttttactttgaaatatagcatgtttacaaaaatgcataaaatatatattcagcctaatggatttttgtaaagcaaacactcatgtaaccacttcctggtcaaagaagaggctgtggctgggcgcggtggcttacgcctgtaatcccagcactttggaggccgaggcgggtggattatgaggtcaagagattgagaccaccctggccaacgtggtgaaaccccatctctactaaatatacaaaaattagctgggtgtagttgcatacacctgtagtcccagctactcgggaggctgaggcaggagaattgcttraactcgggaggtagaggttgcagtgagccaagatcacgccattgcactccagmctgggcgacaagagcraaactctgtctcaaaaaaaaaaaaaaaaaaaattaacagacagtggcggcacacttctgtggtcccagctacttaggaggctgaggtgggaggatcactggagcctgtgaggtcaaggctgcaatgagccataattgcactatggcattccagcctgggtgacacagtgagaacctgtctcaaaaaataataataaaataataataatctgggctggatgtggtggctcacgcctgatttcccagcactttgggaggctgagacaggaggattgattgcttcaggccaggagttggagaccatcctaggcaacagagtgagaccctgtctctatttaaaatatatatatatttttaattaaaaagatgagaaaatacaataaataacaatctgcatttacaagataatcccagtggtttctcgtaccttgcagaactgtctgaagtgctctggactatggtgatgaacagcggccttcagayrcgaggctggggaggaatcgtcggggtttttattatttttgccgtatttgctgtcctgacagtagccatccttctgatcatggagggcctctctgctttcctgcacgccctgcractgcactggtaaggatggttgtcccctggaagctcaatgtggtgttgggaaagggagtgggctgtggggccagccgactgggttcagatcgtgagctgtatgtgactttagcagcttacatacctctttggagccttagtttagtcatctgttggtgtaatattaaatgatgtaatatatgtgtatatatatgtatatatacatatatacacacacactcattcatacttattcagactctcatatatgttagttctcatttactccttcccttttagatgatcagtgttcatttgttattacaattggctttaacccaagtgacatttccaagtattggcaaggtggcatctgagataggctcacagaagacatgcttagaaaatctggaatatttggctttttttttttttttttttttttgagacaggctctcactctgttgtccaggctggaatgcagtggtgcaatcttggctcactgcaacctccacctaccgggttcaggcgattctcctgcctcagcctcctgagtagctgggattacaggcgtctgccactacgcccagctaagttttgtatttttggcagagacggggtttccccatstttgctaggctggtctcgaactcttggcctcaagtgattcacccgcctcagcctcctgaagtgctgggattacaggcatgcaccgtcacacctgactaatttttgtatttttagtagagatggggttcccctatgttggccaggctggtctcaaactcctggcctcaagtgattcatctgcctcagcctcccaaagtgctgggattacaggcatgagccactgcgcccagtgaatctgggatgtttggctcttgttgctgagtagaggagttataccaacaaggtatgaaaatctcaaaagtggaaagagaaggagggtaccaccaggagggagacgctcaccgggagccctggacatgcacagatgtatccagtgacaatcagccgtcgttaggttgatgaatatggaaacatgtttaggcctctggttgtcttccaagttacatttcaaccaagaattctgagtgtgcagtgcatgcccttcagctgcagagactgtacccagcttgccctgatgttttcttcctccctctatggccactattcataaagaagcctttgcacttcatgtactgagtgaggagagccacagcatcccctgcctccatgatgacgtcattcccctccatgtcattgaggagaggaactgaactctgtaaattaataaaacataaatgaggctgggcacggtggctcatgcctgtaatcccagcactttgggaggccaaggcgggcggatcagctgaggtcaggagtttgtgacctgatcgacgtggagaaaccccgtctctactgaaaatacaaaattagctggggtggtggcgcatgcctgtaatcccagctactcaaggggctgaggcaggagaatggctggaacccgggaggtggagcttgcagtgagctgagatggagccactgcactccagcctgggcaacagagcgagactccgtctcaaaataaataaataaataaataaataaataaataaataaataaataaataaaataaaacataaatcatccgacatggtatcagttatgtgagttacaaaaatacaggtcaagggtctttgcgttctataatatgtgagtcccacattttagaattagctggaaatggaaaatgacatgagagagtgctgcacagtgagggtgtcttggcttgtcatgggggtggggaagctccttccatgaaggaagagttgttatgctgtgrccatgagcccacaagcagagaggcctggaggaaatgaaggggaggggaaggggaaggtggtaagagacagatgagagaagggcttaaaaaatcctcagattcatggcctggatgcagtggcttacacctgtaatcccagcactttgggaggctgaggtgtgtggatcacctgaggtcaggagttcgagaccagcctggccaacatagcaaaacctggtgtttactaaaaatacaaaaattagctgggcatggtggtgggcatctgtaatcccagctactcggaaggctgaggcaggagaattgcttgagcctgggaggcagaggttgcagtgagctgagatcgcactattgcactccagcctggaccacaagagcaaaactctgtctcaaaaaatatatatatataatatatttatttttatatatatataaatatatatataatataatatatattataatatatatattataaatataaatataaatataaataaatawaaatatatttakaatataattattatatagaatatataatataatatatattctatataatataatatatattatataatatattctatataatataatatattatrtaatatatataatatattatataatatatataatatattatatattaatatattaatattgatgtatatataatawtatatataataatatatatgatatattatacacacacacacacacacacacacacacacacacacacacacatataaattagctaggcatggtggtatatgcctatagtcccagctactcaggaggctgagacaggagaatctctcttgaacctgagaggcggaggttatagtgagccaagatcacgacactgcactccagcctgggtgatggagcaagactctgtctcaaaaaaaaaaaaaaaaaaaaatcctcaggattctcatggcagccatcagcctgggtgccygccgtggccaacccttctgactttgtgcttgattttacgaacgctctgcttcctccttccctccaccttccagcctctaactgatgtgtttcaatctcccatttcttaccccacggcctcccctcaacaacagggttgagttccagaacaagttctatgtcggggatggttacaagttttctccrttctcctttaaacacatcctggatggcacagccgaggagyaggctgagggctgcacctcccacggtggtcaccatgccaatgaaggaagttcagtcttgtctttgatatcagcccctgcaaggcgctcaatgggaaggttgttcttggctcacctgaagcatgaaactgtgtattatttggacgtcagcctgtggatttgatacgacttaaccacgtcagaggaaggactttggcaagtgatattgtcttcatgtggggtattaattctcaaataataaartaattgacaaatgaggggagaatgctaaacagatgtcttcttgcaatattttaaatattgtatttgagaaaataaacatctgagtcattcactttttccttaagatgtctttattcggccaggcacagtgactcacgcctgtaatcttagcattttgggaggccgaggcgggtggatcacccaaggtcaggagtttgagaccagcctggcaaacatggtgaaactctgtctctactaaaaatacaaaaattagctgggcttggtggcaggtgcctgtaatcccagctactcgggaggctgaggcaggagaatcgcttgaaccccggggggctgaggttgcagtgagccgagatcacaccacttcactccagcctgggcaaaagagcaaaactccatctcaaaaaaaaaaaagatgtttttactcaaaattattccataccagtctgggcacagtgactcacgcctgtaatcccagcactttgggaggctgaggcgggtagaatacctgaggttgggaatccaagaccagcctgaccaatatgttgaaaccccgtctctattaaaaataaaaaattatctgggcatggtggcaggtgcctgtaatcctagctacttgggaggctgatgcaggagaattgcttgaacccaggaggtggaggttgcagtgagccgagatcaagtcacctcactctagcctgggtgacagagcaagactccatcttggaaaaaaaaaaaaattattccataccatttactactgacaattataggccaaagctgaacaatagagctacacaaactaatcccagagaaggatcatgcatattgtatttcctcatttcctccttcctcaaacacctttttccgttgtctagggctaagcattacaagcttaggaactttctcatgaattttcactgaggaagaagagataatgttctctgtttggagggagggccgcccccggtgtggctctctggwtgctaaatcctgtgaaatgaagtgtggcaacatgacatcatcgaggactttgtttactgtcaatgcacgttatgctggagtaactggagaaagagatttggaggcttcgacaagttcagaaaatggtgtgctgggaggaaaaccaccaagaggtctggcccgttactccctggctctgtgggcaccaaagtcattagtcatttcttaagtgcctgcactaacaaactcctaagagtccgataagwtatatatrtgatacacaagatatatatcatatatgatatatgtgataaacaagatatatatgtttgcatatatatakagagaggtagggtctcactcttgcccaggctggagtgcagcggygagatcacagctcactgcagcctcagcctcccaagctcaaatgttcctcccacctcagcctcctgacgagctgggactacaggtgtgtaccaccatgcccagctaatattttttagtttttttgtagagttgccgtgggtagggggtgtctcactgtgttgcccgggctggtcttgaattcctgggctcaagctatcctcccgcctcagcctctcaaagtgctggggttacaggcatgagcacccggccccactgactgttttgtctgaatggactttatccatgtaggttattatcttcatggtaactatactgatagaattaagtataattatctttttttttttttagtgcttttaaaatttacaaaataatagtatcttatttaattttaaattttctttttctttcttcttcttttttttttttttttgagacagggcctcactckgtctcagggacttgctggagtttagtggtgcaatcttagctcgctgtgacctccggcctcccaggttcaagcaatctccagcctcagcctcctgagtagctgggattacaggcaaccgccaccatgcatggctaatttttgtacttctagtagagacgtggtttcactgtgttggccaggctggtgtctcgaaatcctggcctcaagtgatccgcccgccttggcctcccaaagtgctgggattacaggtgtgagccaccgcatctggccagttctaaattttcattgttagtaaagttctaaaagagctgattaaattcaaaatatgctttggatgagaccctgttttttaagtgcctacgtgccctgtgtgtggtaaagctgattggtgctcatggaagcggcattgctcaaacctaaaaggaagcttctgtgtcaccttccatgtcagtatcatgacttttccagcacagtggaaggcacatattagatgctcaatattcacttaatgagattgarcaaaagaatgatagctaaggtcagaaggtgtacatgtttgagtcccaactttgatgctttatcatgagtgccctcaggaaagaaatggagttgttcccctcattgccgaatggaaataatgatctccacctctctggactgtagaaaaggtggttgtaaagccctgggtgtggaggagatactgtcagtgatggttgaactgggagaatagactaagacagcatgcaaatggagggataagaaatctaccaatcccatgctgccatggccactggacgattttcaggttctcagctcacaaatgtccttctcaacaactatctaaaaagaaccctgtgcttaaatggatcaccagcctgttgatccttaagtctattttttttttaatttttatataccactgtgtagttttaaattagaattaggccaggcatggtggctcacgcctgtaatcccagcactttgggaggtcgaggtgggtgaattgcttgaggccaggattttgggaccagcctggccaactggtgaaactcctcatctactgaacgtatgaaaattagccaggcatggtggtgtatgcctgtaatcccagctactcaggaggctgaggcaggagaatcacttgaacccgggaggcggaggttgcagtaagccgagatcacgccactgcacttcagcctgggagacagagcgagacaccatctcaaaaaaataaaaacaaaaaatttttttaaagtaaaaaattasaactacctaaaagacattgcacctttcaagtgtatgacagtgtaacagtgtktaacagttgttttattaagtgaatgcttgaacgtattcaacattaaattcaatttacttcacagtaatgtttgcaaatacattatcacttcttaaatatttcaaatcaagcaacttgaagttcagaaggcttgctctcaaataactcttctacagtgacgcaaagactgaaaggagcctacaacttgagtcccagtctctaaccaacaatgactgtgtcctcactggtgaacycatatgagggagctccaagctcaagaggkgcaggccccttccagatcctcccagaygcatctgtgtgacccccagcaagggcagtaatcaccaccaaaatcttcatttgcaataggtgtacaacaggatgaatgcaaacgcctagtaaagaaactcgaatgggttaccctgataggcattgcactcattctttactccttttttatctttttttttttttttcaracagagtctcactctctctcccaggctggagtgtgcagtggcgcgatcttggctcactgcaacctccgcctcccaggttcaagcacttctcctgcctcattctcccgagtagctgggattacaggcatggaccaccacgcctgactaatttttgtatttttagtagagacggagtttcaccatgtttgccaggctggtcttgaactcctgacctcaagtgattcacccgccttggcctcccaaagtgcttggattacaggtgtgagccaccactcccggcccatcctttacttcttcttcttcttcttttttttttttttttttgagacagattctcactgtgttgcccaggctggagtgcaatggtgcaatctcggctcactgcaacctctgcctcccaggttcaagtgattttcctgcctcagcctcccgagtagctgggattacaggcacatgccaccacgcctggctaattttgtatttttagtagagatggggtttcgccatgttggccaggctggtcttgagctcctgacctcaagtgatctgcccacctcggccttccaaagtgctggaattacaggcatgagccactgtgcctggcccttaaatcatgctatgggccctcagctgggactcttcaactgcaggttcttggtcaatttccttcttggttctgtggcatacaaacagggatttgcctctccatttgaaagccatgttcttgccttctggaatatcaaataacttgattgcaattttcgacacggccgactcatcagcagaagcactgatgctggaaacaaactgggagatgacattcttggcagcatatgtgacacccacagcagttgttgcagttaccaaataggagaaccctttcctagcctcgccatcctcttttgaagactttgtcccatcaaaaatctcaatgcaacagtaatcagggaagtcaggcacattratgtctgtatgggaataacgaacagaagcagggacattgagrcccacagagttgacccaagacaggctcatggcctggccactcagtgactcctggcatagcaaaggctgctccttgtacagcacaggcagcttcagggtggcaggcaccatggcctataccaggggctacagcatgcctgccaccctgcaggatatggctgacaggatgggcatgaacctgctccttaattctaagcaatggctgtgagcaaatgtttgcaagggcaaagcttccctctgccccttgcctaggtcttctctttcagaaattcttccagctgtcctgagaacaacatagtaatttcctccaaagttcggcagcctctttcagtcttaacaagaratgtaatttcccctttaaaaggagatcaagtgcaggctgctgagaagagggtgtgccctaggtgtcattcacttgcccagaatgcgaagttggcccttaaagaatcctgatctgagacccgacctgaaaggagaggataagaccagggagccaggcgtcttgggaacacaaktctggccacccctgagaagccatctgtgctccaatttcygtctaagacttggccacggtgaggggagcaaaagagcctgaaattggaagrctgtccamggaatatacagaggtgagaaatttgtgggcaacattgatctggacttattttttcctgctgctgtagagggtggggtggggcattgactgttagtttgtggccgaaggcaaatggagcatgaaaatttccttggatattgcaaaacaaattacatcacacatcacacacaaaactcagtttaaaaaagrtctactgtggcccaattatttctggttaaaaaacaatcagtataacaaaatacaatagaataaaatgtcaatcagtcctttagaatttgttttaatgaagcttgaactccatctgagttcagggaaaatccccaatctatcagtttctcaccaggttttgtgaaggtaggtcatggattactttcccattgtagctttttaggaacttatagtgagggacgcgaagcattcttttccatgttattccctattttcctgagttggtctaactgatcatccatctgccatccatccatccatccatccatccatccatccatccatcctyttactgggttagaaaggatttagaatgacacaggaaaccagccgggtgcggtggctcacgcctgtaatcccagcactttgggaggctgaggtgggtggatcacaaggtcaggagttcaagaccagcctgaccaagatggtgaaaccccgtctctactaaaaatacaaaaaaattagccatgcatggtggtgggtgcctgtaatcccaggtactcaggaggctgaggcagaagaatcgcttgaacccgggaggcagaggttgcagtgagccaagatcacaccacggcactccagcctgggcaacagagtaagactctgtctcaaaaaaaaaaaaaaaaaaaaaagacatacggaaccaaagaacagagtatgtcaattcagcc

SEQ ID NO: 9848 - DNA, 14804 bp, Homo sapiens
caagaccctgggtttgggaagtgaaaggaagtcccaaggtgactcgggaaacaggccagatgtgagtagaagaaatgtccctatttctcaaagccacctccctttatcttcttctaaacccacagattcccaaaagtgccccaaagatgcccargtagaggttaagggagaagcaaggcaccgggtactactgtttgcagcaaacacggatgctggcctgcccaggggcccctctctcctttyggattttattcaggaatcatcgttggtctcaggtgatcatgacacagctattctcctttgccagtgactgacatgagattcagatctcactaataagatgtaagaggatgtctcctgggagcttttggaaactgtttcatccctgaaaagggaaggcacatgaagaaaaatccaacatccttttgctactgacttcttgcttcctgttttgtatcctgccatgtgaaartayagcatttggagatgtggcaactttgtgctggccatgaaggaatgcgtcccccacacggcagagtacaaggaccaaagaagccaggccatcgccccaggccggcctccctcactggataaacagcatatgcccttatgctgcatgagctggattttccctttcttgtggctgaaatgcatttggatacagtttgtttatactcatagagtcactgtaagtcaggggcttattgtcaggaactacttaacactttrcttaggatattggatttaaagaaaggaattttggggaatccatgctatagarataaaagtatcagtaagtaagagggggaaacatacaaatttaaaatgtgcacataagaaacttaatagtaactcctccctgctgggggcatgggaagggagaaatgaaggaacmattatttttcatttggtaccattctctgtatggcttggattttcttgctattayttttatttgttaaaatctgggcagtgcaataatggggcacttctrtttcttccgttttctgtattttccatttccytctattttctgtattagaaatacactacttagccggrcatggtggctcatgcctgtaatcccagcactttgggaggtcaaggcgggcagatcacctgaggtcagaagttcgagaccagcctggccaacatggtgaaatcctgtctctatttaaaaaaaataaataaattagccaggcatggtggtgggcacctgtaatcccagctactcgggaggctgaggaagaagaatcacttgaactggggaggtggaggttgcagtgagccgagatggcaccaacggactccagcctgggbgacasagtgagattcttcctcaaaaaaaaaaaaaaaaargaaagaaaagaaaagaaaaagaaatacactacttaaaaataaaaggaaatgttatattggcatgtctagagaattgctcctttctccycctccagggaggaaaacagaggaccttatatttagcaatccagcatcactctcctgacattccctctagtagagaatcatgcctaactaaagagctcagagctcacagatagatcacctctgaagccatgtccaggcaagggtcaacaagaatgaaaacacasggtaacacacaaagcattcagtccacaaatcacaggcatcagtctgacttctagtcatacttttgcaaaaagaattccaagagttccagtatctagtctaaatcttataaaagatttatgcattcctgagtactgtttaatactataactaaacactgatacagcacactaagacagttactggatacaaaaaacaatttctcacttaggtaaytcattttttwtttatttatttattttttgagactgagtctcrctctatcactgaggctggagtggagtggtgtgatctcggctcactgcaacctctgcctcccagattcaagcgattctcgtgcctcagcctcccargtaggtgggattacaggcacccaccatcatgtccggctaatttttgtatttttggtagacagggtttctccatgttggccaggcttgtgttgaactyctgacctcaggtgatccacctgtctcggcctcccaaagtgctaggattacaggcgtgagccacctgcgcccagctgcgaaatttttttttttaatcaatccattttcaaatcaaagtatatactgcagattccagcctagttatttcaactcagaactcctcagcttaggcctcttaattgccttatttcataagaagctgactcactcaaaggtcacaaaggcagcgatggcagagccaagatcagaagtgttaaggctgaaaacaggaagagggcaacagaatgtctgtggaggtgctcaaaggttaggcacaattttccttgggcastactcagaagccagccaggaattaccttagttctgtggttctctgcattmagtccctcatatagagatttgttgaaagatatttcaccaaggatctgcagttcagttacatcttttagtaactagaagatggggaaaggaatgagggaaacaaaacatattttagacatgaactcactgtgtttgaacagccttcaccacctttccctttaaaggtattcctgggcttagktaatggccctaacgtacacaacactacataaagttacccaaacaagacatctgcagttattcttcaacttccttttttttttttttgagatggagtttcgctytttcgcccaggctggagtgaagtggtgcgatctcggctcactgcaacctccaccccgtcaggttcaagcgattctcctgccttagcctcccgagtagctggaattatgggcatgtgccaccatgccaggctaatttttgtatttttagtagagatggggttttgccatgttggccaggcttgtytcgaactcctgacctcagatgatctacccacctcggcctcccaaagtgctgggattacaggcgtgagctgccgcgcctggccttttcttcaacttcttttcccttgtgccatccaaagtcagttcttgactgactgacttatttttgagacaggatctcgctctgtcacccatgctggagtgcaatggcatgatcatgggtcactatagcctcaaccttccaggctcaagtgatcctcccacctcagtctcctgagtagctgagaccacaggtgcaccccaccacactgggctaatttttgtattttttgtagagatggggttttaccatgttgcccaggctggtctcaaactcctgggctcaagyaatccacccaccttagcctcccacagtgctgagattacaggcatgagccaccacacccagcttattcattttatttaacgtaagagatttttcctttttttttttttttttttttttttttgagacaaggtctcactctgwtacycgggccggaatggagtggctcaatcatagctcactgaagcttcaaattcctgggctcaaacgatactcctgcctcagcctcccaagtagctgggactacaggcatgagccaccatgcgtggctaatttatgtatttatttatytttaagaaatggggtttcactatgctgyccakgctgatcttgaactcctggcctcaagcaatcctcccgcctcagcctcccaaagtgttgggatgacagatgtgagccaccacactcacaattctttttttttaaattatttcytgtatctgtccctttcttttccacccccattgctacttcttcagttgagacctcacaaatgtcacctggatcactgtaaaacattaaacttgatcacttgatcactagttcccactttagaataagtgatcagggaaggcctctctaagaaaataacacgtgtggccgggtgtggtggctcatgcctgtaatcccagcacttcgggwggctgaggtgggtagatcatctgaggtcaggagttcaagaccagcctgaccaacacgatgaaaccccatctctactaaaaatacaaaattagccgggcgtggtggctcacgcctgtaatcccagcactttgggaggccaaggagggcggatcacctgaggtcaggagttcaagaccagcctcaccaacatggagaaaccccatctctactaaaaatacaaaattagccgggtatggtggcgcatacctgtaatcccagctacttgggaggctgaggcaggagaatcgcttgaacccgggaggcggaggttgcagtgagccgagatcgtgccattgcacaacaagagygaaactccgtcttgaaagaaagaaaagaaaagaaaagaacacctaggtcgggtgcggtggctcacgcctgtaatcccagcactttgggaggctgaggcgggcgatcacctgaggtcaggagttcgagaccagcytggccaacatggtgaaaccccctctctactaaaaatacaaaaattagctgggcgtggtcgccrgcgcctgtaatcccagctactcgggaggctgaggcaggagaatcacttgaacccgggaggcggaggttgcagtgagtagagatcgtgccactgcactccagcsmgggtgacagagcaagactccatctaaaaaaaaaaaaaaaraaaagaaaagaacacctgagctaaatttaagaagaaaccacctacgtcaggacctagaggaagagcagtgtcaagcaaaggaacagcaagtacaaagtcttgtggccagaataatgctgtactggcgagctagaagaataggacagaataacccgattataaaaggggcagtgggagagaaaggcgagtactaggagatgaagttgaagaattaagcagagaccagatcaagtactgccttgctctggccatgaaaaaagtatggattttagtctaagtgtgctcaagcatcagttttgtttgtttgttatttttaataagcaggggartggcacaatctaatgtctgctcttagaagacggatagctgttacgtgggaattatttgtaaagaatgtgggaaaagcagaggcaagaaaggcaggccgaagsttattgcaacagccctggcaagaaagggtagcttgaattacaacggcagtggaaatggagagaagtgaatgggtttaggatatattttggccctgaaatggcagggcttgctgctggaatagacgtggggatgtaggaaagaggagtcacaggtaatccctcgagttccttgtactgtaactggagtatatctccctcctgagggtagctaaggaacgggttgggacagagggttggttttttgcaccaaaagayctattwtggacatggacaygttatgcaaagatgctattatctcttctaggggcgatgcccgtgagcaactggataatcaaatctggagcatttcagtctcaaacacctcctcagagtgatcccaggagatctctgcagccacggtgacattttctttatctgaagcgatgacacagctcactgaatgccmttcttccacatgctggaaaagcgaggtctagtgaacacaattcctttccgtgcggaaagtctgaaatctttttaacacttcggacacagagcatcgtaaggtcccagaatagagggtgtgagcaatttcagcgctcacctcggcccaagcraagctccagcgggagcaattgagacccagggacgaagctagggagggcctggcagcccccggcactggcmggcaggggtaacccaggaaaaacagtctcctggcctctcgttacccgcttcaggccctccgccctcccctggcctctcgggacggccgcgcttacctgaaccgaactgtacgcacaagcgcgctcctgactccaggtgcacaccgtggaggcctgaaacgagagccatgaccgcgacgcgctgaacaaaccaagccgccagttttccgtcccgtcccggccccggccctggcgaggtgcgcatgcgcagggccgggagctaggaccccgcggcaggcgggcgcgtccgcgtcgcacggaagtctcgcgatgtttgcgtttgaacctcttggcgggtgccggccatggcggcttcgctcccgggacctgggagccggcttttccgcacatatggggctgcggacggcaggagacagcggcggccgggccgggaagccgcgcagtggttcccgccgcaggaccggaggcgtttcttcaacagcagcggcagcagcgacgccagcatcggcgacccctcgcagtccgacgatcctgacgatcccgacgaccccgacttccccggcagcccggwgaggcggcggcggaggygtcccggcggccgagtgcccaaggaccggcccagcctgaccgtgaccccaaagcgctggaagctgcgagctcgcccaagcctaaccgtgaccccaagacgcctggggctgcgagctcggcccccgcagaagtgcagcacaccctgyggcccgctccgacttccgcccttccccagccgcgactccggccgcctcagcccggacctcagcgtgtgcggccagcccagggacggcgacgagctgggcatcagtgcctccctgttcagctctctggcctcgccctgccccgggtccccaacgccaagggacagtgtcatctcgatcggcacctccgcctgtctggttgcagcctcagccgtcccgagcgrcctccacctcccagaagtctccctggaccgagcatctctcccctgctcccaggaggaagcgacaggaggagccaaggacaccaggatggtccaccaaacccgcgccagcctcaggtcagttctctttggccttatgaactcaggaacccctgaggattctgagtttcgggcagatgggaagaatatgagagagtcctgctgtaaaaggaaactggtggtgggaaatggaccagagggtccaggtctgtcaagcacaggcaagaggagggccacaggccaggactcttgtcaagagagagggcttcaagaggccgtccggagagagcatcaggaggccagtgttcccaagggccgcattgtgccaaggggaayagacaggctggagagaactagatcaagccggaagagcaaacatcaggaggcaacggaaacctctctcctccattcccaccgctttaaaaagggccaaaagctgggaaaagattcgttccccacccaggacctgactcctttacagaatgyctgcttttggaccaaaaccagggcttccttcagtttccacaagaagaaaattgtgactgatgtgtcagaggtctgcagcatctataccactgccacttctctctctggatccctcytatcagaatgttcaraccggcctgtcatgaacagaacaagtggtgctccgtcctcttggcactcctcctctatgtatttgctaagccccttaaacactctaagtatttcaaacaaaaaggcatctgatgctgaaaaggtttatggggaatgcagtcagaagggtcctgtcccctttagccattgccttcccacagaaaaactgcaackctgtgagaagattggggaaggggtgtttggcgaagtgtttcaaacaattgctgatcacacacccgtagccataaaaatcattgctattgaaggaccagatttagtcaatggatcccatcagaaaacctttgaggaaatcctgccagagatcatcatctccaaagagttgagcctcttatccggtgaagtgtgcaaccgcacagaaggctttatcgggctgaactcagtgcactgtgtccagggatcttaccctcccttgctcctcaaagcctgggatcactataattcaaccaaaggctctgcaaatgaccggcctgatttttttaaagacgaccagctcttcattgtgctggaatttgagtttggagggattgacttagagcaaatgcgaaccaagttgtcttccttggctactgcaaagagcattctacaccagctcacagcctccctcgcagtggcagaggcatcactgcgctttgagcaccgagacttacactgggggaacgtgctcttaaagaaaaccagcctcaaaaaactccactacaccctcaatgggaagagcagcactatccccagctgtgggttgcaagtgagcatcattgactacaccctgtcgcgcttggaacgggatgggattgtggttttctgtgacgtttccatggatgaggacctgtttaccggtgacggtgactaccagtttgacatctacaggctcatgaagaaggagaataacaaccgctggggtgaatatcacccttatagtaatgtgctctggttacattacctgacagacaagatgctgaaacaaatgaccttcaagactaaatgtaacactcctgccatgaagcaaattaagagaaaaatccaggagttccacaggacaatgctgaacttcagctctgccactgacttgctctgccagcacagtctgtttaagtaagctaaatgtatcttactgccccgaaatgagaggagactggtcttgaagcctctggtgctgtttcaacctccrtccccacaggagggtggaactcccattctcacaggtttccagtcagcttttcaaacaagaattttgtttccaaatggaaactgaaatatttgttgaaatgtttaaatttgctgataacaaatgttctgaaagaagtaaactagccgggcrcagtggcgtgcgcctgtartcccagctactcgggaggctgaggcaggaggatcgcttgagcccaagagttcatatctagcctggtcaacatagcaagacccctgtctctatttttttaaataaataaactacatgtgaaaacaaacgtttatatttataaaccctctttttttttttttwaattttattgagacagagtcttgctctgtcacccaggctagagtgcagtggtgcgatctcagctcactgcaacctccgcctcccgggttcaagcaattctcctacctcagcctcccgagtagctgggattgcaggcatacaccaccatgcccggctaattgtttgtatttttttagtagagatgggggtttcaccatgttggccaggctggtctcgaactcctcaccttgtgatccacccacctcggcatcccaaagtgctgggtgattacaggagtgagccatggcacctgacctataagccctctttctaattgtcagcagagtcctttctgtaaattcctttccgttttttgagccttaacacttatgtagtctgagcaaaaaaaaaatgcccaggcttcagcttcatactgagcagagcctgttgcttcaggtatcaaggctagctttgggaaccagactacagatgagacaactgaaagcaaagaggctgaggcaaagcagagaccaaaaaagagtytcaggggagaagaagggaagctagtaagcaacttatagggggcagtgtaagaaatgtcacatgttacatcrctcacacagagaagcagaatttatcaattttcaaagggaaaatgtctctgtctactgacaaggttttaatttttgcttttttttttttttgagatggagtckcactctgtctcccaggctggagtgcagtggcaggatctcggctcactgcaagctccgcctcccgggctcacaccattctcctgcctcagcctcccaagtagctgggactacaggygcccgccaccacgcccggagaattttttgtatttttagtagagacggggtttcaccgtgttagccaggatggtctcgatctgctgaccttgtgatccacccgcctcggcctcccaaagtgctgggattacaggtgtgagccaccgcacctggccaatttttgcttatttttcctcaaagggaggaaaactgacaggttgctttaagagctgagtgattgagagtccttctgaacaggacttcgggaatttactcctaatcttttcccatggttaacttgycttcactctgtttctagaactctggtttttatacttgagactctgtagtcactgtggaaagaggtgtgactgataaakaactgcctttaaatacctgagtcctcgtcagcttcttcactgctrcaacctggagacctcgtaatttggttgggacgcaaatttgcaactggtattctgctccaaagaggttctccccatgtacctgcaaattaaaatcagagtaggaaatcaaagctggtattgctttgccatctacagctttacaawaataagtacttacatggaagaggaattctttgtggtgagaaagcccctggcctgtgttcacgtacattatggatggtctgcaattgasaggacatgcgtcagcccttgaggagtctttctcccttttttggagacagggtctcactctgttgcccaggctagagcacagtggaacaatcatggctcagtgtagcctcaacctcccaggctcaagtgatcctccacctcagcctgsgaaagtgttgggatgacaggcatgagccactacactcatccctttttttttttttttttttttgagstggagtcttgctctgttgcccaggctggagtgcagtggtgcgatctcagctcactgcaacctctgcctcctgggtttaagtgattctcctgcctaagcccccaagtagctgagattacaggcgcctgccaccacacctggctaattttcatattttyagtagagacggggtttcgccatgttagccaggctggtcttgaactcctgacctcaggtgatccacccacctcrgcctcccaaagtgctgggatgacaggcgtgagccaccgcaccyggccttctctttttgaatgaactcgactgctttcaactgaatacattaggacagagggcaccagacctttaccaggaatgaggccgggtgcagtggttcatgcctatcatcccagcactttgggaggccgaggcaggcggatcacctgaggccaggagttcaagaccagcctggccaacatggtgaaatcccygtctctattaaaaattttttaaaaattagctgggcctggtggtgtccacctgtagtctcaactactygggaggctgaggcaggagaatcgcttgaacctgggcggcagaggttgcagtgagccgagatggcaccactgcactccagcctgggcgacagagtgagacttcgtctcagtttaaaaaaaaaaaaaaaaggaataaaagctgaatgtcaaaatataaagtggtcgtagcgcagttggggtgaggtggaatatttgaattctgtatcgttgggctggttcattttctaattatccctcaaatggccttactcatcccctccttacttcccagtcccacagctgccttcttccctccacagcgtcatattaattcccttttgtagcacgactagttggcaatacacctcctttgatgaccacagtggggtttytgtgacccaaatgttagcaccctagagatcaatatcagagcctgggttctaagcaggctcctctcagaaggacagtgtccacattcatcctgaccaccagctccatctacgagagagagcccaaagctgccccctgggcgatggagtcacaccgctgctggcctcttgggagtactcacttggacagaactgcaacgaagccatgcctgaattgaagggtgtgggtctcgttggccaaagaccrtctttcattggaactaggaataagagtgttagttcatagcacacctgctttgtacatagcaagtgcttcttaaaaagggcttcgctctgttgcccaggcaggagtgcagtgttgcygtctcagctcactgcaacctccgccccccgggttcaagcaattctcatgcctcagcctcctgagtagctggaattacaggcgtgagccaccatacccagttaatttttgtatttttagtagagatggggtttcaccatgttggccaggctggtctcgaactcctgacctcaagtgatctgcctgccttggcctcccaaagtgctgggattacaggcrtgagccactgcgcctggctatttttttaagttccagggtacatgtgcagatgtgcaggtttgttacataggtgaacgtgtgccatggtgctttgctgcagctgtcaacccagcacctagttactaagcccaacacgcattagctattcttcctgaagctctccccaaccctgcccctcccacaggccccagtgtgtgctgttcccctccctgtgtccatgtgctctcactgcagaacaggtgcttctgcacctggctccccagggtcactgggagtcagataagaaaaggctctcagaggctgggcgcggtggctcatgcctgtaatcccagtgctttgggaggccaaggctggtggatcacgaggtcaggagttcaagaccagcttggccaagatggtgaaaccccatctctactaaaactacaaaaattagctgggcgtggtggcgggcgcctgtaatcccagctactcgggaggctgaggcagagaaytgcttgaacctggaggcagaggttgcagtgagccgagatcacgccacagcactccagcctgggcgacagagcgagactcgtctcaaaaaataaataaataaataaaaggctttcagagataagcaattggagttcagaattgtctctagaagaccacacttagaagaatactgattttaaaagggcttctcagcctccacactattgacgttttgggccagttagttcttggttgtgggggctgtcctgtactgctctgcgtgatgtttggcagtattcctggcctctacccaccagatgtcctactgaacacccccctccccaagtcatggcaatcaaaacaggcacagcctctggtgggcagaatcacctccctttgagaactcttcccagcagygttccccaccttaccccccaacacagaggtcttgcagrtaacatagctatcccaagctattccaaagctgagtgaacragaaccagaactccagggctcattccaccaggctgtaccacagttttactttgtgtgtgaacaaaagaacattttcattatctctggtaacaagaagagaaagtcgagtccctgcagggaaacagatgccttctgtgggctcactggggtttcctttctccctgggctgtaagggggccgttcctctcacagcgtgcatgtggcagggagatgtcttccggggtcatagcctgactctgctgtgacccaggcagtacttacttggtgacagtcacagtgatgtctgctgtcctgtttggaaaggcattctcctctagctgccaaacgactgaaacatgagcctattttaaagggggaaaaatggtcagttgattctctctatgccactcacaattcagaccgctagctactcgtggaacagacctaggagacgattcctcagattttcacattcctcacatttttctaacacagcatgtttcctttcccttcctttttyttttttttttttttttttgagagggagtctcgctctgtcacccaggatggagtgcaatggtgtgatctcagctcactgcaacctctgcctcccaggttcaagcaattctcctgcctcagcctcccaagtagctgggattacaggcacgcaccaccacgcccagctaatttttgtattcttagtagagacggggtttcaccatgttggccaggctggtctcgaactcctgacctcaaatgatccacccacctcggtctcccaaagtgctgggattacaggcatgagccaccgcgccyggccccgttatttcakttaagcctcaaatacaaatatggagtaagcaaggcaggcggcctcattccccttttacaggtgaagaagccacttcagagatttcccacagcacagagatgacaagggacagatcagggttaataacttttcgtcttggccgggcatggtggctcatgcctgtcatcccagcactttgggaggtcgaggcaggtggatcacttgaggacaggagtttgagaccagcctggccaacatggtgaaacccyatctctaycaaaaatattttaaaaattagccgggtgtagtgctgcacgcctgtaatcccagctactcaggaggctgaggaaggagaatcacttgaacccgggaggcggaggttgcagtgagctgagactgtgccactgcactccagcctgggtgacagaatgaaactccatctcaaaaacaaacaaacaaaaaaactttttgtctgacacgccctccatactacccacaacttcactctgcttcayggaggtgagcaggcagttcacctagggctgtgtactggaaagctctcrtccccatcaccccctactttcagagccagcttagccactgtaagcactgctggggacacactgcagtcaagcgaagcgcaaagctggaaccgagagattgagrtgagaccaagrtgcagaagacgccaactgcagggtggtgagaagagcgaatcrgtccaaaccgactcacagatgacctcttgaggacggggtgaccaatcctgcagttcatgatcaggacagaagcaaccggctgagggtcatcacastgaatgtttggagagggaggctgttaamagagcagatgacattctcttaaagagccaaacaaaacaaaacaaaaacgtggtttcctcacagcaattcagcaaacattcactaatttttctgcctgtcagacaccctgccaggagctaaagaaataaagtccacttggtccctgtcttcctcacaagccggacaggcagggtcagcagtagatccccgaggaatttaaatacaaggtcgaaggggtgcttctgtgagg

SEQ ID NO: 9849 - DNA, 14010 bp, Homo sapiens
gactttggaggcaaactgactgaatttgaatcccgactcagccacttacttgctgtgtgaccttgggaaattattcagccattctgtgcctcagtttcttcatctatcaaatggaaawaataatagtatctacctcatagaataatgctgggtatgtagtaactactcaatatgtgctgtcattattattattatgcttagttgtaatacatgtccttcacacattttatccggtttcctatcttcatgctacaaagcttagacctctaacaccttaaattaattgttcarttacaaaagcagattcaaaattcttctgtgagaaatgttttggatttatccataggcataattgctactcacctctgcaaaaggggagagccttccatgtgggtgcaaaactagctgatcagtaagcacttctgagatctaaagcctatagttttctcattagccaagagttacttcatttattcaatttttttttttttttttttgagatggggtctcactctgtcactcaggctggagtacagttgtgtgatcatagctcacttcagcctctacctcctgggctcaggtgatcctcccacttcagcctctcaagtagctgggaccacaggtatacactaccacacccagctaatttttgtattttttttttgtagggactgggtctcaccatgttgcctaggctggtctcaaactcctgggctcaagagatctgcctgccttggcctcccaaagtgctattcaacatttattatcaggtactgtgctgggcactggagatagcactatgacctgacaagcacagttacattcttcacagagccaaatgtcttgtggcagatagacagagcctgatgggcggttattataagtgattcacaagaggatgcctgcaaatggacgaggaactcctgactagcagcacaatgaagacgagggaaggggatgagataatgtctaacgtggacgttaagaacatggagaactagatgggggtgggaaatgaccgagcaagagtgttccagctgagaatttgcatgtgctgtggccatgagataagacagcttagggagcatgtagagaaatttattttattgtatttttttgagatggagtcttgcactgtcgcccaggctagatgcagtggcgcagtctcagctcactacaacctctgcctcccaagttcaagcgattctccttgcctcagcgtcccgagaagctgggattacaggcgctcgccaccactcccagctaatttttttgtatttttatgagagactaaaaatgttggccaggctggtctcaaactcctgacctcgtgatctgcccgcctccgcctccaaaagtgctgggattacaggcgtgagccaccgtgcctggcctaattttgtattttcactagagacagggttttgccatgttggccaggctggccttgaacacttgacctcaagtgatccacccaccttggcctcccaaagtgctgggattacaggcgtgagccaccacacctggccaagcacatagagaaattagtcattccttctagctaaagggtagagtttgagattgtgtgattgaattgtgaaagaatttctaagatttgttaagtaatttaagtggaagacaatggggtacaggttgagcattcttagtcctaaaatctgaaatgctccaaaattcaaaagtttgagtatcaacacgatactgaaagtgaaaaattccacatatcagtacttagcacaaggtttgtttcatgtacaaaattatttaaaatattatgtaaagttacctttaggttatgtgtatacggtacatatgaaacattaataaacttcgtgtttagacttgggacctgtcccsaggacatctcattatgtatatgcaaatattgcaaatcccaaaaaacccaaaatccaaacacttgtggccccaagcattttggataagggatactcaacttgtaccatcaaaagatttaaacaggagagtagcatgaaagagcattcagttaatgtcctagagaatgaacttgggaggggcatggatgaaaatagggagatggctggagatagcacaatgactagtagccagctgcaaagatactaagcccatagaaccatagaaccaacaggactttgtgatggactaggtgtggggagggaaggcaggaatagacttccaggtttctggctgagatgctggtagaaatgataatacctgatgagaagcatatttgtagagaacaaaaggggaaataatttgctttgagttgttgacatgttgagtttgaggtgcctttgagaattaggttgaatagagtagcctagagcagcagtacttaaaagaagtaagagtgtgagtcattaaattttctattacctatatcaaaaacagtaaaaagaaacaggtgaaattagtgttaacaatgacattttgtactaaagctttgaaatcatctagtcacattttactcatctagtcacatttttagtgtccagtattttactcatctagtcacgtttttagtgtccagtatctaccgcaagacagagcagtgccagacctaaggaattcaatttaggctgctgatagagaattagaaatttgtaggcatataaatggtaactaaaatcatgggagtgagagcagtcagcaatgtatggggccaaagaaagaaactactcatatttaagagataggaagggaaagagcagctcatagagagcaactcagaagagaatgaaaaagactggcgtttgtagcactcatcagagaattctatcaagataacccataatccaacacttgccatatttggatgaaatttgttaattgagagcaaaaaatagtaagaaatatcattttccatttctcttaagttttctaggctctttctgaagtttgttcagcagaaagcaacatagcaaagtttttgtagtttcgtgaagaatctgctttgatgaattatgatttaatgagatagstttaattttatatattatcagtatattaaaatgttcctcatatgtatctcttatcttttgcaaaactattgtctatatatataacatgtttgttattacagatcaatctcagcgaggtagcctcttcactctctttttgaacaatcctctaatggccttcctatttgtctctggattgtcaagcatgcgcagaggcctatgggaaaagtgtcaagaatatcttcgaaaaatcaaccgtgatattgcccagctactgactcattcacgttcaataggtaccctcctaatctaactgcacrtttaacagaatgtactataatggcttaaaatggttacttattttaaattgtttgaatttttaaaggtatgtgtcccaggcaggaaagttgagaacgctttcctgaagtttccttcccctttgaaacataatttccatttaagcatctttttactgtcacttttctcctctttgcagatcaggcatttctccagttttttggagatgaatttcttcgcttgctcctcacaagatttatcttttgttcagccaccatgaggatgcacaagatttttcgggtaggcaaagaacattattaaagacgaattttatcattttaggtatttaagaaccatgtattatattttacctgtataaaataaggttataataaaataatattattttggataaattcaaaataatatttacaaatgtaccgtcacactggtctgctaagtaaaaaaatacatttgaatacgtaaagtataaagattaacaatattaaggcacatttgagtacctatcgtttgtttaaaagtagaacattttctggctggccgtggtggctcccgcctgtaatctcagcactttgggaggtcgaagctggtggaacacttgaggtcatgagttggagaccagcctggccaacatgctgaaactccttctctactaaaaataaaaaaattagccaggtrtggtggcacgcgcctgtaatcccagctactctggaggctgaggcaggagaattgcttgaacccaggaggcggaggttgtggtgagcagagattgcatcactgcactccagcctggacgacaagaacgaaactccaactcaaaaaattaaaaaaaataaaagtagaacattttcaatacatccctgatcctatctccctctcaaatgaaacttacatcctgaattttatttatttatttatttatttagagatggagtttcactcatgttgcccaggctggagtgcaatgactcgatctcagctcactgcaacctctgcctcctgggttcaagtgattctcctggctcagactcccaagtagtagctgggattataggcgcccaccaccacacctggctaattttttgtatttttagtagatacagggtttcaycatrttggccagsctggtctcgatctcctgacctcaggtgatccacccgccttggccttccaaagcgctgggattattggcatgagccactgcacccggccctgaaattttttttttaatcattcatttttctttgtagttttgcagcatgtatttctattcctacacaacatatttatgaatccatattgtatgtattctgcagcttccttttttccagttattcctgagattgagccatgttgattgactatagctttcactcattcattttgtttgactgtgcaacactaggcagtgtttgactatatattgcaaatcacttattcttctgataatggacatttgggttgcttccaagtttttattattatataaatgatactggccaggcgcagtggctcacacctgtaatcccagcactttgggaggcagaggcaggcagatcacaagctcaggagttcaagaccaggctggccaacatgatgaaatcctgtctctactaaaaatacaaaaattagccagacatggtggcatgcacctgtaatcccagctactcgggaggctgaggaaggagaattgcctgaacccaggaggcggaggttgcagtgagcagagatcatgccgctgcactccagcctgkgcaacagagcaatactcagtcttggaaaaaaaaaaatgatgttactgtgaaattcttgtatcagtttcctggtacacatatgtaagattttctctgaggaatatacctaatagtagaattgcaagatcagaggatataagcatatttaattttactaggtaatgccagactgtgttccaaagcggttgtatcagtttacacttataccagcaggatataagagttgctatttctgtaatccttcctttccaacacttgttgcaatcatactttatagcttttgtgaatctgctgaatgtaaagtggtaggacattgtggttttaatttttatttcgaggattactgttaaggttgagcaacttctcatatgtgttctgtttttctctttgtaaagaatgtgttcaagtcttttgcttgacttgatagtccagttttctagctgttgcttttttgtgtatggatgtacctatacaacacttcattgaggttttaaatattttagccattatatttttcacttctgtaaggaaaatttttttttcaaatatgcctgaacagttaaaaaaatattttgcagcttttggtttcagaatattatttctttctgttttattatgataattttgaaatgtaaaagaactgtgcaatgggccaggcgcagtggctcacacctgtaatctcagcactttgggaggccgagacaggagcatcacttcaggctaggaatttgagaccagcctgggtaacatagtgagacctcatttctacaaagaaatttttaaaattagccaggagtagtgatgtgtgcctatagtcccagctcttcaggaggctaaggtgggagaattgcttgagcccaggggtttgaggctgcagtgagctctgattgtaccactgcatgggccaactgtgcagttccacttaagacacagcctttttttttttttttccaaaaaataaattggaaaaattttggagatttcctacagtttggaaaacagatgaactacatagcctaggaatattgaaaacattgctcacctgggccctgcggccagcagaattggccccgctctatggctgctggggcctgcgcactggaatcgccgtggcctgcgcaccccaccatgccagtttgaacctccatggcctcaaccagattcggaatgtcaaaaagcagagtgtctatttgatgaatttgaggaaatcgggaactttgggccacccaggctctgtagatgagaccacctatgaaagactagcggaggaatcactggactctttagcagagttttttgaagaccttgcagacaagccatacacgtttgagkactatgatgtttcctttgggagtggtgtcttaactggtaaactgggtagagatctagcaacctacgtgatcaacaagcagacaccaaacaagcaaatctggttatcttctccatccagtggactcaagcgttatgactggactgagaaaaactgggtgtactcccacgattgcgtgtccctccatgatgtgctcgctgcagagctcactaaagccttaaaaaccaaactggrcttgtcttccttggcctattctggagaagacgcttgatgcccagcccggttttaaggatattaaaagctgtcaggccaagaccccagcttcattatgcagctgaggtctgtttttttgtttttcgttttttgtttttcattcctgcttttgargaacagctctgtggaaagaacgtgttgcctcctaccttgcccacaagttttgatttttaatttctacagaagatttttttggattaattgtctgatttcctccctcatatgatatcctttatcttttataatgtcttatccctatacctgaatataacaacctttaaaaaagcaaaagaataagaaggaaaaattccagcaggagaaatgaattgtcttcactcttcattctttgaaggacttactgcaagaagtacatgaagagcaactggttaacctgctcactgttctgtctcaaaatgagacacattaacgggtaggctacaatgttcctggrcttctttcaaagtggaagcacttctgagctctttagcattgaagtgtcaaaagcaattcacatgggaagacaatttcttatatgtgctttgtgactgccagggtgtggcctgcactgggttgtcctgggagacctagtgctgtttcttccacatattcacgtgtgtgtgtgtgtgtgtatttttttattattttttcattttaagggttagtatggaatcagctgctacaagaatgcaaaaaacttccaatgacaagaaaggaggaaaaaaaagccattttcatgagctgagtgatgtagcataataaacaaaatcatggagctgaggaggtgctttgtaaacgtgaaggggcataaaaaggaaagagatacttgtgtcaataaagagagcctggtcctagacgtagttcagccacaaagtagttgtgcctttgtggacaagtttcccaaactccctgagcctctgctttcccatctgttaaatgaggggatagaatatggttgatttccagcattcagtggtcctgtcaagcagcctaacaggctagctctaattcccattgggtagatgaggggatgacaaagaacaatttgtgagctatataggaaacattgttattggtgttgccctatcaggatttcagttgaattcatgttaaaattacagccgtcctttattgtacacttattgggttaagcctattataccatattacctcattttaatttttactgacctgcactttatacatgaagcaacaaggctccaggacattaaaactcacacaaagttatgctcatgttatattattttcttacttaaagaaggatttattagtgacaagtttgtattaatatgtagcaaaggcttttccaatgggtgaataaaaacacattccattatagtaaaaaaaaaaaaaaaaagtcaagctgggagaagtggcatatacctatagtcccagctactcaggaggctgaggcaggaggactgcttgaagccaggaattggagatcagcctgggcaacataggaagatcctatctcttagaaaaaaaaaactcttaataatgaaacagtataaacagaagctaagtaaaatattttctttctcctgaaataaaattattttttgagtctgatggaagtgtttaagtgcagtaggtcagtgccagtgagaaaaaaaataaaatcatacaaaaaaagaaatattgaataaattaagaaaaaggtatatcatraatacataaaatatatgtagacactagtctattttatcatttactactataagatatatacaaatctattatgaatgattaaaatttatgcacacacttacagaccatatatggtaccattcacagtccagagaagtgtaaacaaaagtaatgatgcaatattaaatcataactgtccttgtgatagtttgctgagaatgatggtttccagcttcatccatgtccctacaaaggacatgaactcatcattttttatggaaggacaaaaaaccaaacaccgcatgttctcactcataggtgggaattgaacaatgagagcacatggacacaggaaggggaacatcacacaccggggcctgttgtggggtcgggggaggggggagggatagcattaggagatatacctaatgtaaatgacaagttaatgggtgcagcacaccaacatggcacatgtatacatatgtaacaaacctgcacgtgtgcacatgtaccctagaacttaaagtataattttaaaaaatcataactgcataaaatcactgtagtgcctactgtactactgtaataatttggtagccacatcctgttgctctggcagtaagctcaagtgttgcaagtactgcttagaatgcctgtcatttccgtgagcagtttgtctctccagtaaattgtgtattgtaataaaaaatgatctctagyggttctcacatattttttattgtgtttagtgcagtactgtagtaaaccttgcataacaccatgggatccatatgaagtgatgcttcaagtgctcccaagaagcaatgaaaagtcatgacattacaagaaaaagttgaattgcttgatatgtaccatagatcaaggtttgccattgtggttgcctgccatttcaagataaattaatccagtaaggagtgttgtaaaaaaagaaaagaaaatttgtgaagccatcactgtagctacgttagcaggcatgaaaaccttacactttttgtgaaatacctttttatctcataatgaaaatgtagcgtttatgtaggtgcaaggttgctataagacatacttacaggccgggcacagtagctcacgcctgtaatcccagcactttgggaggccacagagggtggatcaccttaggtcaagatttcaagaccagcctgaccaatatggtgaaaccctcgtctctactaaaaatataaaaattagctgggcgtcgtggcgtgagcctgtagtctcagctactcgggaggctgagacaggagaactgcttgaaaccagaaggcggaggttgcagtgagctgagatcacaccactggactccagcctgggcgacagagcaagactccattcccccccgacatacacacaaaaaaaagacatatattatgatttgagaaaaagcaaactcattatataacaaagcaaaaggaaagtgaaggatctacagctagagaattaaattctggcaagaaagggtttgataattttcgaaagagctttggctttaaaaatgttaagataacacgagaagcagcttctgccaaccaagaggcagcagacaagttcccagaaagtaccttttctggaaaaaaaaaaaaaacctgccacaaaagacatttattagtaaggaagagaagtgaacaccaggatttaaacaggaagggatagacaactctgttattttgtgcaaatgcacttgggtttatgatcaggagagtctttatctataaagctgctaatgcaccttgacagaaaagataaacaccagctgccagtacaacaagaaggtctggacaacaggaactttcttccagattagtttcgttgatgctgtgtccttgaaatcaggaagtaccttgccagtaagggactaccttttaaagtttttttgatatttggcaatgccgtggctgtccagaaccccattaattctatactgaaggtatcaaagtggcctacttgccccagaacacaatgtcagcctctagatggggggtcctaaggacctttaaggttcattacacagagtatgtattatcaaaactatggaagagaacccccaatggagagaacatcatgaaagcctgaaaggattccaccattggaaatgccatcattattacagaaaaaggcttgaaagccatcaagcctggaatcattcctgctggagaaaactgtgtctagatgttgtgcatgacttcagaggatttgtgacaatcaaggaaatcatgaaagagattgtggatgtggcaaaaagggtggggagtgaagggtttcgagatacagatcttggagaaattcaagagctaatagacaccacaccagaagaattaacagaagatgacgtggggtggacatgaatgtttctgaaccagtgccaggaagcagacatagaagaagcagtggcagaaaacaaatggacattagacaacccagcagaagggtttagattattcaggattgggcttttgacttctatgagatggatgcttctatgataatggacactgaaatgaaagcaaatagtggaaggattggtgccatatagaaacattttagagaaatgaaaaagcagaaatgtcagacacaaattatgacatatttgcataaaattatacccagttgcctgtctctcctgcctccccttccatctccttcacctctcctctctctgccacccctgagacagcaagaccaacccctcctcctcctccacagcctactcaatgtgaaggcaatgaggatgaagacctttatgataatccacttccatttaatgaatagtaaatatatttctcttccttatgattttctttttcctttttttttttttttttttttttttgagacagattctcactctgttgcccaggttggaaggctggagcacagtggcgcgatctcagctcactgcaacctgcacctccggggttcaagagattattctgcctcagcatcctgagtagctgggattacaggcatgttccmccatgcccgcctaatttttgtatttttagtagaggtgggatttcgccatgttggccaacctggtctcgaactcctggcctcaagtgatcctcctgcctcagcctcctaaagtgctaggattacaggtgtgagccaccgtgctcagccctggccaattttyttagtaacattttcttttctcagccsggcgctgtggctcacgcctgtaatcccagcactttgggaggccraggtgggcagatcatgaggtcaggagttcaagaccagcctggccaacatggtgaaaccccgtctctactaaaaatacaaaaattagccgagcatggtgtgagcacctgtaatcccagctgctcgggaggctgagacaggagaatcgcttgaacctgggaggcagaggttgcagtgagccaagattgcaccattgtactccagcctgggtaacaaaagcaaaactccgtctcgggggggaaaaaattcttttctctagctaactgtattgtaagaatacagtatataggctgggtgtggtggctcacgcctgtaatcccagcactatgggaggctgaggagggtacatcacctgaggtcaggagttcaagaccagcctggccaacatggtgaaaccccatctctactaaaaatacaaaaattagccatctgtggtggcatgcacctgtaatcccggctactcaggaggctgagacacgagaatcacttgaacctgggaggtggaggttgcagtgagccaagatcgcgcgactgcactccagcctgggtgacagagcaagactgtctcaaaaaaaaaaaagaaaaagaaagaaaaagaaaaaacaatatataatacatataatatacaaagtatttgttaattgactgtttatgttatctgtaaggtttctagttactggtaggctataagttgaattgcttgatatgtaccatagatcaaggtttgccattgtggttgcrtgccattttaagataattaatccagtaaggagtgttgtaaaaaaagaaaagaaaatctgtgaagccatcactgtagctacgttagcagccatgaaaaccttacactttttgtgaaatacctttttatctcataatgaaaatgtagcatttatgtaggtgcaaggttgctataagacatacttacagaccgggcacagtagctcacrcctgtaatcccagcactttggcaggccacagcgggttggtcaccttaggtcaagaattcaagaccagcctgaccaatatggtgaaactctcgtctctactaaaaatacaaaaattagctgggcgtcgtggcgtgagcctgtagtctcagctactcgggaggctgagacaggagaactgcttgaacccagaaggtsgaggttgcagtgagctgagatcacaccactgcactccagcctgggcgacagagcaagactccatccccccccscmaaaaaaaaaaaaaaaaaaagacatatattatgatttgagaaaaagcaaactcattatataacaaagcaaaaggaaagtgaaggatctacagctagagaattaaattctggcaaaaaaagggtttgataattttcaaaagagctttggctttaaaaatgttaacacgagaagcagcttctgccaaccaagaggcagcagacaagttcccaggtgccactgaggggaaaggatacctgcctgaacaggtttttagtgcagaagaaagtaccttttytggaaaaaaaaaaaaaaaaactgccacaaaggacatttattagttaaatttcaggtagttaaaagttatacatggatttttcagggagttgaaagttatacwtggatttttaactgtgttagggagggggctcagcatccctaacccctgcattgttcaggggtcagctatatttgagttctgacatatttgtccatttatggattcgtcttaccattcatcagtagatcttttttttttttttttgaratggagtcttgctctgttgcctaggctggagtacaatggcgtgatcactgctcactgcaacttctgcctcctgggttcaagcaattctcctgcctcagcctcccgagtagctgggattacaggtgtgtgccaccacgcccagctaatttttgtatttttagtagagatggagtttcaccatattggccaggctggtctcgaactcctggcctcaggtgatccaaccgcctcagcctcccaaagttctaggattacagggatgagccaccacgcctgacaccatcttattttttaatgcattttgaagtaaattgcggacgtcacccacaaacacttcatcatgcatatatgtaatatgtttactttttttttttttaatgagatgagatcttcctatgttgcctaggctgatcttgaacttctggattcaagctatcctcctgcctcagcatcaaacatagctggaactataggcacattgccactgcccaactactaatttttttttttttttttttaatttgagacagagtctctgtctgtcatgcagtttggagtacagggatgcaattgtagcttactgcagcctcagtctcctgggctcaagcagtcctcctgcttctagcctcctgaatagctgggaccacctgagtacggtgcaccaacatgcccagctaatttttaaatttttttgtagagatggggttttgct

SEQ ID NO: 9850 - DNA, 37331 bp, Homo sapiens
accctaatttatatacaaccagtatatcccagtttccccccaactgctagtttccagttcccttccacctaattttgtcctgcaatcttgtaactcaaacctaaaatggacatcccagagaacccgggcctggctttgttctcrcccaggcaacttccctctgaccaaccccagaaccctaccctccagaacttgccccccgamcatcgatccctggaaacacatgtgctgctgccacaggggcttccacctgcccacamagcaggccccccaccatcagacccctctcacctttgttcccrtgccctgtccctgcccaataccatctctccaaggactgattggactttgtttcctttcaaaagggcttgaatgaggagtagctttgmcacatcttgatctgctcagccctggaggtgccagcaaagccccatgctggagcctgtgtaacagctccttgggaggaagcagaataaagcaattttccttgaagccragatcctgactccagactcttcttcactgmcctgaggaccyggggatggggtctggmmtaggggaggtggaaatgcasgggagtgggggcaaattcaaaggcctggcctaggaggccttcgtggagcagcactgaaaacccctttcacttcccccaaaccagccaaatgcagyagaggcgacacctctcctcccagccttctccctggtccagccaggatttaaaggagatttagggagacccctaaagttcacctagagcaccctgagcccatctactgtggacctgcaccccagcttccgtcaaccctgccccacccaccaccatggatactgcccagggctgggcaaagggcagcggttcggggtgtgggtgctggccagtgccctttctgagcccgcagaagtgtgaaccactgggccaggtgaggcaatggctgcctaagtgccagtcccaggcgagtctctgagagtacacaaggattcacagctgtagcctgcatccccttttaaatagagccaccaccctctccagccaccgccagaagccagcataccccctgcccaccacaggtgggagaaacacaccctcagcccacctgccgtcctcctcagctcctcctggtgccgagcccccttggcccagggtgctcccttcttcccactcatttcttcccattgtaattcccattaccaagccctttgtcctctgggcttgtgggaagatggggttctcctggcccatttatggcaagccatcttgaggggaggcagacagatgaggggctggggaaggttatgtgtgaacaggactctggggagagggagggaagggatggctcccgagagggccaggaggtggaggaargagtaagtctcctccaactaaacaagttcagcccctttggagttcctgccacagctggrttgcttaggcaggcctggkactgtgggccacagaggtcaggggcttgaaaggcactggggctgtcggccccactgggaacctgggaagsagtggttcarccctggactggatctcccccaacccaccaacatacccactcggagcccactcctgctctstacccagctctgagctcggagctctgaggactgcggcasscagagccaagggccctaagccggagaaggagaaaccagtactggacaatagcaggtgacagcagaggagaaaaagggggtagggaggggacaaggaaagacctgagggggtggcagtggacaaagagattgagcaaccacaggacaaggtaaccagaggaaacagagacaaggaaaaaagatgcaggaaatgaggaggccccagaaagayccgcaggcgccgccacctttctcctcatagccacctccattctccttccctaggccaacccagacagagctccctcaaaccagggatgcttccttttcatttatccagctcaattgaaccacacagccccagaggccaaggtaattcagttctctgtgatttctaggattctttcagcctttttgtttttgtttttgtttttgtgacggagtctcactctgctgcccaggctggagtgcagtggcacaacctcggcttgggccgagatccctagggccattcctctggctaggaacagacttggacagcaatgaagagataactagaaacaaaggaragaaccsytgaaaagggagctatgcagagagacccagggcacctaagcaaccagagcaagagagaccgcaagagatacagatcctatgagaatggtcgggggctggatgcagacagcagggttgagagagstctgagagccaagccagggagaaggaggggtgctgagggggatggggagagaggaaaagagagggagccttggagggagaagcttgaagagctgcgggtggtgatcccgagtgaaggaaagaatcctgggtcacttgcaaatgcaaggagagtcaggaaggcgcaaggagattggagaggaggaagagcctggagcaagatgtggaggcccagggcgagagaagaggccagctcggagagggcagagcctcatgttagaccctgagccgggtggagacacgggccagggagaatcggaggcaggccccactctgagatggagaagcaggcagagggaatgaaggtgagacagagacagatgcaacggggagccaggcagaagacaggcaacctgtgccagggaggccagccttgcctccttggcaccctcacctgtggccgaagcctccatccctgtccttatattccaggactcccagcagaatgaggagctgtgtgcaaggcagcttagggaggacggagagcaatatgtgagagcagggagagaaggagcctggggaagggagaggacggtacagcggagcagacgggcagggcctggggctgagtgaacaccttccttcctcctccttccacaggagcgggggactacmccccaccacctccactccccgctgccctgccaccaccacctataccaagtgaggcctgctcagagcacagggttccctgaggacaaagcctggtctttgtcacctgaccccgacccagactgacctggcgttctcagctccttatcatgtccccagagctatgggaaccaagcagtgacgcactggccatgggctaaccccccggctcraattctggggcctcgagtaacctagagctggggacaggtggcctgcatcycctgggggtaatgatttggcataagcacctgcrgaagatggggatgtggggtcaactaaggtccctccaaggacattgagaaaaggtccaaatgctctgraaagagaggtgtgttcctgagcccaggaatggggtggcagcgtcctagggagctaggggagaggccacatcttaatggaaagtgctcctacccagagaagctgacccctgtcgtcctacccacctccacaccctggagctatattgagaggtgacagtaaactggtgggaggggggctgggagggtgttcctgggtgtgagggtggggggaaggccagagcaggggagtctggctttgtttcctgaacacaatgtccacttagtcataacaggaacagcctgctgaagacctgacacctacagcctctgagagatggcagcattggaggatggggagcggggccttgagggcctagggtgcttgaggacacccrcaaagaagggaatgtgagtataagccctggagggcttggaaaggggcaacaaaattctgcctggggagggggcaggtggcagagccccaccccgatggaatgcagtgcctggggaccagatggtgtaaatccccaggcctgccaggcacctgcaccctctggcagcccggtgaggcagaaggggacagcccctcacccacccccctcctctctcaggccctaggattagcaccatcttcttctgcccaccccaccccaggagcagagggtagcaggggagggcaaaagcctatgtgtgcaaatgcggatgtgcaaatgtgtgcatccatgtacacaaaagaaagtagaaaagaaatctgcaagcttgagtgggtaagtgtgaaaaatctgcatgtgtggctgaagatgggcacagacacggtcaagtctgtatgtgagagtgctgaactggggttctgtgtgaaaatctgcctgaggcggcrgggagaatcactgccattgygtgagcaggttggatgttggccactctatcaggagcattagggaaggggtggggactccagacgtgtccccaaaccagggtggcctcaagaccttgggagaacacttgtctgaagacttggggaacagaaggagaccaggcatggcacttatgcagactgaggccaggacagaatttcctgacaaaagaaaactgagccatggagatggacaacagatcccttccctgggcaccatactgcagcttttagtccctagcactkggggctccagtactaacagcaggaagatgctcccagcctgggactgtgtgagggakgtcagaatggraaggagaggctggggaacaggggaggaaagcccatggttgggaggcggaggacaggcatttggcctgcaggagaaggtgaccctcacccatgttttcagttcacccttcgggkkaaaaataactgaggtaagggccatggcagggtgggagaggcggtgtgagaaggtcctgtcttcccactatctgctcatcagccytttgaaggggaggaatgtgcccaaggactaaaaaaaggccgtggagccagagaggctggggcagcagacctttcttgggcaaatcagggggccctgctgtcctcctgtcacctccagagccaaaggatcaaaggaggaggagccaggargggagagaggtgggagggagggtccctccggaaggactccaaatttagacagagggtgggggaaacgggatataaaggaactggagctttgaggacagatagasagactcctgcggcccaggtaagaggaggtttggggtgggatgccctgcagcccgtccacagagcccccaccgtgagggacctccttcaccaggagtggggtgcaggtcagttggaggcctaagggctctattaaaactgcctatctccaggcccagggaagttccccctgacacaaggaggttccacaggaaacccagaaacctcttttctccttctctgactctccatttctttctctgcatcattctgagtctcctrcatgttgtctccatctttccatcttccttcctcctttggatggcttccttcccttgatcctggttttatcttgcctcttggtcttcatcgacacttgtcacaatcatgcttctttgtctctctcccttgtccttccttcttggcacktgttctcacctccctgcctctctgcttctaaccctgtttccacaccccgtccctcgcactcatattgactcggtgccctttcttttctgcctctgcgtctttccctttctgactccctggtctgtcctgcctgtctgcgctctggggctgcctccatccccgggtggcctgcctctgttgttcttcactctcctcatctgttcttctctctgcccggctctacctctgttgttccttgctccacccacggtccagattcttcaggattctccgtgaagggataaccaggtgagaactgcccccattttctctgcagagactggggcatgcttctcctgggagccggattgctggaccaggggtctgctgtcccaagcactcagcgccaacccttagcatactccagccaatgccaccccagggaaaccccttacagagattgtccttcagcatcacctcagagggcaggagaagcagagccctgagtaggggagggtgcaacagcaggtgcctctcccagggtggaggagaggagcgggggtagggaggggggctgcagaggacaaagccactcgctggagcctgggctccctcaggagtaacatagccctcctgtctctgacccaggggaagcaccaagatgaccgatgcccagatggctgactttggggcagcggcccagtacctccgcaagtcagagaaggagcgtctagaggcccagacccggccctttgacattcgcactgagtgcttcgtgcccgatgacaaggaagagtttgtcaaagccaagattttgtcccgggagrgaggcaaggtcattgctgaaaccgagaatgggaaggtgagtagggcatggygccggggcagaagggaaggaggtctgggaaagaagatgcagaggtggagccacttgcagggggagctgagagggctggagaaaasccaagsccagtggggatgccagsacatgctcctttgaggascccagaatctgatccctctcaaattgacctgagctggtgcaacaggtgccacccagggccatgttccccctgccagagaggatgctgaggaagaagracctcagtgttcgcctaagaggggtsttgtagataaagagggcacagacacagcattaaatgatgcccccttcttgcacttgtatccctcttccctgtgcctcagtttcctccatgagtccactttctcaaattmmgttcacccaaatcaagagtaattcttagacccagatgaacacaaagatcagaaacttttgagctgagcactctccttgactggcactcagaagctctggtccctggtttgctcacrccagccaagagaatcacccctggttaccagctgcggctcagggctgtgtgcctcatgaactcgttgactgaatgttacaacccattgaagtgtagaataacaggccacaatcccctggggcttttgactctgatcccagctctgccacccgctagtcactgtgcaggcaaatcatttagtcatttagagccacggatttctccactataaaaaacactggaatacctactggcaggatctaatgacatcagggcatggcaarctgactgctgccaatcaaaccacaccaacagtgatggatggggagtgtggagtagatgggtgaactacttttccagcaggggtgaaggtttgccctgagcaacagataccctaaagcgctgcccgcgggagacagcctcggggtcagcataaggtgtgcacagatctgagagctgccaatctccaggtctgccccaagacccttggaacatagggactgaagagtgatggtcatgggcacagggtgtccccaggatggtctggggatctggcaagagaaaggwwccctaggacagtctctaggatgggagatacaatgggaagggaaattacctggggaaaststcccaggggacatcggggtaggggccggggcactggtcagagcaaggggagcaaggccaagtccctgtgtcctgggaggaggtcagtgggcagtgctggcaagggtccyggaggrrttgtggtcactcatcctcctgcttatgcgccccctccagacggtgactgtgaaggaggaccaggtgttgcagcagaacccacccaagttcgacaagattsaggacatggccatgctgaccttcctgcacgagcccgcggtgcttttcaacctcaaggagcgctacgcggcctggatgatatatgtgagtrgctcctgcacactgcagaggcttcctgtgctgcgtggaggcctaaataagccaggggggctctcccaagaagagggggagagactcccaagggacccaagtccccttcccccctccacccctagtcagctgcaggaggagtagagccagctggagtgaacagggacatgcctggctgccaccactgcctgtcccaggctctccccaccaacctcatgcccagccttgtctcctgctccagacctactcgggcctcttctgtgtcactgtcaacccctacaagtggctrccggtgtacaatgccgargtggtggccgcctacmggggcaagaagaggagtgaggccccgccccacatcttctccatctccgacaacgcctatcagtacatgctgacaggtgagcctggtggcccctggtctctgctcctcctcccagacacccacccagatcctcagccctgaccccattgcttctcctcttttttcttccagatcgggagaaccagtccatcctcatcacgtgagcgagtgccatcctcccacagaagggactgggctgggggcatacacgctgatgcctagggtgtagttgggaggagaggtttaaggctgggattgcagggagcmtggggcactgagctctcattagaggggtgccagagcaatgaaccatgtcaggcaaatcctgctgggtgctgggctctgatggccrggctgggaaggggagcatgtgatgctgagccctgtatggagaacagtaggaatcctgagttttgattggtctctgtggcccccaggggagaatccggggcggggaagactgtgaacaccaagcgtgtcatccagtactttgccagcattgcagccataggtgaccgtggcaagaaggacaatgccaatgcgaacaaggtgccatgggggacacaggctcggcagaacaggggttggggggcaggctgacccgagttacccctaaycctcccctccctgtgacgtggtggggacagccacactgagctgggctcccgatggtcagcccagtatggaagaccttcctgacaggagacactcaccctgaggtctgggtaggatcctgtggagtcgcagacccactagcggttcacccagccccgcacccccattcctcagggccagggcagcctccctgccctctcaccactgcctggaggtggatggaggatgaacccatgcagttctgctcctttcatagggcaccctggaggaccagatcatccaggccaaccccgctctggaggccttcggcaatgccaagactgtccggaacgacaactcctcccgctttgtgagtgcctttgaccactcccagtggcctcatccagccttgacaagaaaaagggggtgctgttttgccacacccagttgattgtactgtatctggctttgggatatcaacatgcacacgttggtgggaagagagcataggctttggagccaaaggtcygactttccacttgctcagcaagtccttacacctctctgagcccyagttccttcacctgtgaaacaggggractaatatccaccctgcagattactgggaggattaggtgagatcatatgagaggtatgagcaggaggcattctgtatgtgttcccctctgggccgaggttccactaggaggtccctgcacagtgtgtgagggtggcatcctctgcccggcttcacttatactcaactgagacaccaaagaggtygtttacatttccagaaccatccagggcttctgggctgaacagagggccaggatttcactctgtccttcccrccagttccctcactctgtcccattcgtccccaggggaaattcattaggatccactttggggccactggaaagctggcttctgcagacatagagacctgtgagtaccagcagggaggctgccaccctctaggtccccctctgccttctctccctgcctggcggccagtctcatcattcctgccatctcctgttttgtctgcatttgcctctgggctttaggatcctttttatttaagccacatcttctcgcctggccctcttcatcaagctgtgggtgccccctgccctctgcccccatggccrcctttttctggctctactctctttccttcctcacctgccttcctcccctccrsccacctcagacctgctggaraagtcccgggtgatcttccagctgaaagctgagagaaactaccacatcttctaccagattctgtccaacaagaagccggagttgctgggtgaacctgcctgccaccccccacccactgctgtccctgctgcacaccccaacgactcctgcatgcagggcagggccctcctgctccccactgtgccccaccttgctgctcacttcccttctccctccactcactccgccagctccctctcgcttccctcccaagaccacctgcgtctcctctcgcctccctgtgcagtcacacacctcactccttctccacccttctctccactcctccctcggcttgtctttgccttctcctctttatttgcctccccatctcccatgtgtcactcccctgccaccctccctcctccttgttactggagcccctgccagggcccctcttctaccctttcacttcctctgggttcactccttggtccttgctgacttctcttctctccctgctccctgtcctcccttcctccattcaccccgtcccttacccctccctgcccctccctccctttcccaactctacctgccccttccctgccctccgcctgcccccttgcccctgcctcaccccttgcctggtgcagacatgctgctggtcaccaacaatccctacgactacgccttcgtgtctcagggagaggtgtccgtggcctccattgatgactccgaggagctcatggccaccgatgtgagtkagggggctgctgcggccgttcgagggaccccaggagctcctggggccaccgctccaacccccctctttgtctctcgctctgtcccagagtgcctttgacgtgctgggcttcacttcagaggagaaagctggcgtctacaagctgacgggagccatcatgcactacgggaacatgaagttcaagcagaagcagcgggaggagcaggcggagcmmgasggcaccgaaggtgggaggggcaggcaggcagccctgggaaggcctgaggtgctgaccaggctctctgcgggactcagatcccagagactctgaggcttgtggggcagtggggtgtgttgtgggatggtgagggacagggacgtgggagacgtgggcagacagagagtccaccacaatcccaactcctcaaccccagctgcactcaccagaactgaggtggggaattttcctcctgtgcccaagactcccccagccccaggaagcacagcccctgagctctgcacatcaccatcactaatgcagggcctttgcctgcccagcccttgggtaagcccctcgtgggctcataccatgttgtttgggaggcagtgggccaggggtcaggacatagcccagggcattggtgtgtcagtttcctcctcagtgaaatggatcaacaatctttcctcactcctctggtggctactgtgaggtcctttgagaaaatgtgaaggtgcaaacagtgctagacaggtgcccaagaacattcctccctaccttcagggacccttctccaagtctgcccagatcaaagtgtcaagctggggttcatgataacacaccaacagttattacaacattcttgaaattacaccaaataactcctcctctaaacagagaaatacccatgttgggtggcacatttggatggctgggggtaggagcgtggtactgtctgatatactctcagccagtcagattgggtaacatgtggatggagaagacagcatggccagtccagggctagacactggggtagagaacgaaggagacagggagcagaggacatctagcccctcagccacacccttgccctggagaggcgagggatatggtgaaggtggggatatgcccacagcagtgcttgtgaaagacctgacccagagatgcyacagatgtagagacagagctgagaagagccagttgtggcaagaggccatgggccggataagggggctgtgctccagcctgactcaggcacacgttggttgagtaaccaaggcaagccctgtgctcttccaggccttgatttcttcctctttaaggaaaagaaattggacctgatgcttcctaaagtcttgkccccaggacagggaaggaggctcactccctgaaagtgttcactcaggccaggtgcagtggctcatgcctgtaatcccagcactttgggaggccaaggcaggtggatcacttgaggtaaggagtttgagaccagcctgggcaacatggtgaaaccctgtctctactacagatacaaaaattagcctggcatggtggctcatgtctgtagtcccagctacttgggaggctgaggcaggaaaatcacttgaacccaggaggtggaggcygtagtgagccaagatcgtgccactgcactcaagcctgggtgacagagcaagcctctatcttaaaaaaaaaaaaaggaagtgctcacttatcctttccctctcaaccagatgctgacaagtcggcctacctcatggggctgaactcagctgacctgctcaaggggctgtgccaccctcgggtgaaagtgggcaacgagtatgtcaccaaggggcagagcgtgcagcaggtgtactactccatyggggctctggccaaggcagtgtatgagaagatgttcaactggatggtgacgcgcatcaaygccaccctggagaccaagcagccacgccagtacttcataggagtcctggacatcgctggcttcgagatcttcgacgtgagtwgggacccctgggagtgggagaacaatcactcgcttgctcctacattcaacagccatttgctgagagccagctgtggaccagacatgggaaggcagtggggactgygtggtgacagaggcagtcattgtcccygtcttcaggggaagccctcctccactgccctgacatggaggggacagccataccctgctgggctcggcacagtgcaygggcacagccccartggccactcacacccactttctgactgctcccacccctcatgccccctgcagttcaacagctttgagcagctctgcatcaacttcaccaacgagaagctgcagcagttcttcaaccaccacatgttcgtgctggagcaggaggagtacaagaaggagggcattgagtggacattcattgactttggcatggacctgcaggcctgcattgacctcatcgagaaggtgcctccttggcctcaccacctatgccccctcctctgccatccagacaaagtggtggctgagtcccttctacacccaagaaactagagtcccaagaatcccaggcctttctccaggcccagcttctccccactgtgaagtcatgggcatgaacaggatgatccccccactcttcctttcccaggaccttgcactttatgcccctttgtggtggtcccctcagtgtcttaagagtgagatgtagtgaaggagaggcccctggcccctctgaccgcccatgagaagcgtcattcatggaaagatcctaggctgaaattagagatgtttggcctcccaccaccttcctgttggttgagaaataagccagtctccagccctcttgcttatgggcattcctcagaagagacaaggccgcaggcgggaggccccataggcyrgggctgacttgctctcagtgaacctctgctctttgtcagcataggccagagcccggattgtctgacccacacccagcccagccacggccttcatgaaatgggagcttccccacatgctttgggtcattatccagattcttaaccagagttctcatgtttcagagccctcagaatgccataaaactgtgtgtggaaaaaagcatgtgtacattcatacatacatgtgtgtgcttgtgcatgtgtgtgtgtgtrcgtgtgtgtgtgtacatgcgtttttctggagagacagtctttagcttcaacaaattcttaaaaggattcctgccccaagaaaaatcaagaaccaccaggtttttggaagtgcagagtgtggtaaagaacctggatccttctatctaacccttgaagaattgctactggtgtcatacagacagagcctggcccggtgcctctgacacacatctgtccctgccctcctgcccctggggcagtgagccatcagagagaaggggctgtgctgtgaggcactgtgggccttgtggggggtgattaggagtgcatgactctttgttggacccactgggcagaaaggaggaggaaggggctttttaaattccaggaatattggcttcctgttttagggtaagaggtaccagcacagcgccccttcagcaggccagcgctactggctccagattccttttcctgtcagggtatgggactgtggaagcctgggagtgtgytcagtgattctctctttgcctcttcaccctgccctcagcccatgggcatcatgtccatcctggaggaggagtgcatgttccccaaggccactgacatgaccttcaaggccaagctgtacgacaaccacctgggcaagtccaacaatttccagaagccacgcaacatcaaggggaagcaggaagcccacttctccctgatccactacgccggcactgtggactacaacatcctgggctggctggaaaaaaacaaggatcctctcaacgagactgttgtggccctgtaccagaagtcctccctcaagctcatggccactctcttctcctcctacgcaactgccgatactggtaagcaggcagcccctgcactgggccaggggacttctgaagacacaaagggccagggtcctgctgcttcaaagcacatgactccataggcaggcacaggggagcccatgagtcaagccacctcctggctcacctcaccacagtccagctgggcttctgtagcacctgccgttctccactttgtgttatgagtgttgatatagctgtctcatgtttcctcaagatggggagtaactggaggtcagtgagggtggcacatgcatccctgtaccatgcccagcagggaacgatgcatgtgggagttctcaacaaatgttgagaggacactgaacaaaagagcctccagttcagaaaaggaagagaaaggatgtggcttgaaatgaagaggataaagtgtaagaagaaaagtagaggttgggcacggtggctcacgcctgtaatcccagcactttgggaggccgaggcgggtggatcacaaggtcaggagttcgagaccagtctggtcaacatggtgaaaccccgtctctactaaaaatacaaaaattagcctggcgtggtggcacctgcctgtagtcccagccacttgggaggctgaggcaggaaagttgcttgaatccgggcgacggaggttgcagtgagccaagattgcaccactgcactccagcatgggtgacagagtgagattccatctcaaaaatagaaggaagaagaagaagaagaagaagaagaagaagaagaagaagaagaagaagaagaagaagaagaagaagaagaggaggaggaggaggaggaggaggaggagaactagaatgtggaaagatataagaaggaagggcaagtagagggagagctaagggcactgatgtatgtcagtgcctactatgggcaagcaccagtgagctgccctacaggcgtggtcttatctaatcctctttacaactttgggaagttgttactgtcatcctcatggtaaactgaatcttggagaattccttgcccaaagtctcagagctaccaagcgagcagcagagctctgcctctgcccaagggctcctttattttccagctcctgttgattatttctcctctcgctgtttaggggacagtggtaaaagcaaaggaggcaagaaaaagggctcatccttccagacggtgtcggctctccaccgggtaagaagggcccaggggtgccaggacacctggtggaayggcccagcccagagacttctggctgcaccacctattctgatgcttgagtttgatgaggaaagaagctagggctacgtagtygttttttagtgtgtagattccacaaaagcctgaactcaygtcacaaattatgtggcagcccctgtccctttgatgattctggtggagagtgtctggggaccagggtttaagggcctaagggatggtccttgtggctcctaactccccaccttcatctgcctccaggaaaatctcaacaagctaatgaccaacctgaggaccacccatcctcactttgtgcgttgcatcatccccaatgagcggaaggctccaggtgagccaggagaagaccttagtctggggaggacagctggcatccactttaccctaaggctgaccctttccccttccctcctgacacaggggtgatggacaaccccctggtcatgcaccagctgcgctgcaatggcgtgctggagggcatccgcatctgcaggaagggcttccccaaccgcatcctctacggggacttccggcagaggtgggtatgagggtgcmccagagctcatagaacagggggagccaggctgccctgatgggaatgggatctgcaggtgaccctggaattctgtgggcagagcagatcactgcagagcatggrtgactctggacacttccctcctcaggtatcgcatcctgaacccagtggccatccctgagggacagttcattgatagcaggaaggggacagagaagctgctcagctctctggacattgatcacaaccagtacaagtttggccacaccaaggtgagtctagagccccaytgggtggttgcagggcaggtggccatgttgagtggagcagagaggagtttaggaggcagaagcctaattctggcttccttatcaaccttatcaagggctgaaacccaggcttcattccggtcttgtttgtcaaatttttactcttacttctagaaggcatggggtgatgggtcacctgggagctcatccagggtcttccaccctggatactcccctctgaggctgcggcctgttgcatctaccccttgcctgcaggtgttcttcaaggcagggctgcttgggctgctggaggagatgcgggatgagaggmtgagccgcatcatcacgcgcatgcaggcccaagcccrgggccagctcatgcgcattgagttcaagaagatagtggaacgcaggtgagacaggaggaaaagggaggcatgcactagagatgtagaggcagatccgcaatgtcaactagtgtgggtcagaagacctgggttcagacctaccagctggcctgggcaagttactttaccacttcgaatctcattgcaaattcttcttcttcttcttcttcttcttyttttttttttaaagaaacttctctataggaaaatgcaaattaagacaccaatgaaataccattttaaaacactagactttgcttgctcagatggtctacaaattttaaaaaatgaaagaaacaagtagataaaaataaaatgaaaggaaaaataatttttaaaagttttaaaaatcactagactgacaaaaattaagaagcctgacccactgcttacagatgtgtaaattagtgcaacttcctaggaaaacagtttatcactatcttttaaagttgaacagctgcaggccaggcgcggtggctcatgcctgaaatcccagcactttgggaggccgaggcgggyggatcacgaggtcaggagatcaaaaccatcctggctaacatggtgaaaccccatctctactaaaaaaatacaaaaaattagccgggtgtggtggcagatgcctgtagtcccagctactctggaggctgaggcaggagaatggcatgagcccgggaggcagagcttgcagtgagccragatcgagccactgcactctagcctgggcgacagagcgagactccatctcaaaaaaaaaaaagttgaacagctgcatacttctccattccactcctgagtacattcctacagagaaactcttatacatgtacaccatgacatgaaaaataatcttttagcagcattggtcataatagcaaagatcttraaacaacttgaatttccatccacaggggaatgggtaaatagtattacagtcattcagtggaatattataaaacagtgaaaagatgtgaactccarctacatgatacaatatgtttgaacattaaagcatattgttagtaaacaaaggcaaatcttggaaggatacatacagtatgatgcaatttttataaagctcataaataatcaaaaccagccattcattgtttaaagatacatacatatggctgggcacagtggcttatgcctgtaaccccagcactttgggaggctaaggcaggcggatcacctgaggtcaggagatggagaccagcctggccaacatggtgaaaccccgtctctactaaaactacaaaaattagctgggcatggtggcaggcacctgtaattccagctactcaggagctgaggcaggagaatcgcttgaatccgggtggcagaggttgcagtgagccgagattgtgccattgcactccagcctgggcaacaagagtgaaactccatctcaaaataaataaagtaaaataaaaataaagatacattcatatgtggttaaagtaatttttgaaaaagcaaggaaaggaaaaataagattcagagtggcggctgctcctggcggggtgacaggggtgtaggaaggaacgcacaggtagatcaatggctggtaacatttcagctcctgtttcagtggtaggttcatggatagtcattttgctttcatgctgcataacttacatacttattatagacattcttatatgtaaaccccyacataatttttaacatatttgaagttmttatgagaatagaaaaaccaaacagagtagacattctataagtggtagtttccattaccactaatatcccagctgggaggatataaactgccctttcatcaaattgattaataaatatttatcaagcaactccatgttcagtgtagtgatgttggaggtgggtgtgcacaagaaggaagtctacrtgcctacgaacttgcttagtagggcccatgattgggaagctctcttttatagtgccccaccctgcctccaygtttccttgccagggatgccctgctggtaatccagtggaacattcgggccttcatgggggtcaagaattggccctggatgaagctctacttcaagatcaagccgctgctgaagagcgcagagacggagaaggagatggccaccatgaaggaagagttcgggcgcatcaaagagacgctggagaagtccgaggctcgccgcaaggagctggaggagaagatggtgtccctgctgcaggagaagaatgacctgcagctccaagtgcaggcggtgaggccacgtgattatctcttcagccctctcctcccctcccctagattatagcccatctcacaaccagggactgggagtctaggagtgccagctctttttaagaccctaggtctcctctcttyaaccatcagcttcctccctgttctcttctcccaggaacaagacaacctcaatgatgctgaggagcgctgcgaccagctgatcaaaaacaagattcagctggaggccaaagtaaaggagatgaatgagaggctggaggatgaggaggagatgaacgcggagctcactgccaagaagcgcaagytggaagacgagtgctcagagctcaagaaggacattgatgacctggagctgacactggccaaggtggagaaggagaagcatgcaacagagaacaaggtgagggcagctccctctggcttcagcccaggtctcctcaagactcccagactagagtgttgtcctggtccttggcatggaggtccccatagatgtctccaggctggtgatctttgaccctaaaggggatgggtttttggtcggcaggtgaagaacctaacagaggagatggctgggctggatgaaatcatcgctaagctgaccaaggagaagaaagctctacaagaggcccatcagcaggccctggatgaccttcaggttgaggaagacaaggtcaacagcctgtccaagtctaaggtcaagctggagcagcaggtggatgatgtgagtagtaagaaccatgctcctgctctcagagcaagattttgcaggcaacaccaatggcccagaaagtcctgatccctagaattaacttctatggcccctgaagcttttttgctctctgtagttcctcactacagtaggtctctgaatcctttgtgcttgcaggatttctctgtyggtttgacttccaatcccactggacttcaagtttagaaggaggcaaaagagcatacactatggatttcatgttttccacactttgcttattttcttccctccaacagctggagggatccctagagcaagagaagaaggtgcgcatggacctggagcgagcaaagcggaaactggagggcgacctgaagctgacccaggagagcatcatggacctggaaaatgataaactgcagctggaagaaaagcttaagaagtaggagactgtggtggccaggaggggctaatggaggtgtctggcctggtagatagagtgcagggtsstgcgcctccactggccacagttgccttgggtatgctgggaataaggtcaatcacagccctcttccgccactttytgggctggcgaggggagggggaggtgccgattctggcatactaaggccaagaagagaatgagccccagaggaaggaaggctacctgtcactcccccacccccacccttctcctgcaggaaggagtttgacattaatcagcagaacagtaagattgaggatgagcaggygctggcccttcaactacagaagaaactgaaggaaaaccaggtgactttttttcccagtgcatgaaagtgggagctcaatagccctgaggtaactgaggctgcagcagctgcttagggttctacacaatatctggaactccaggcagcctcataracccaaccatccctgacttacaggcgctcaggaacactagccttcccccatagagcaagaatacattacgttagcaaaactgtttgagaagggggactcatacctactaaagggcttctccttctgagatctgctctgcctcagggactttctactctaagacaaatgatagagctctattctcctctaacccttcctctggtagttcagccstctgaacgcagggtgaaaaaaaaaaaaggcttcaaggagcaccttcctgtgagskgctctgttcatattcttcccggtactaaccccagccactaacccaggctgagtccccatagggcactcatgataagagccaattccaacaactgtgagcaagtcacttaccctccctgatcctcagattctcttctcacctgtaaaatgagactgacaatacctaccacacaggaccagaggggataatgtatttgaaaccattttgtcaactaggaaattctatacaagtatcatattaatatagcccaatttagagaagtcagccagccactagcctaagaaggtattgttttgtcttctcaatggccttctcattcctctgcagctcaagatttagtgaacagccatagtctcccttagctttaatgaacctcaaaccctaatgtgcttttagtatcgggtttgtcagaagagacctggaagtccactgccatccccattatagagctacagaagctacatggccaggtctggacatagtgaccccaagggcaacaggaactcggctactggggcgggaccttgtcctctcactttggggcagactgtggctggtagaaagaggtagtctcccctctgcacttgaggcccatggcccaggctgcaagtaatgtatgaacacaattccactcctctggggctgcacagggactggcccgccttcattagtaatttgccctcccatsttcttggatgccccttctgggttttagctagaatatcgggccatcctcaggttcttctaccctaggtctgggcawcttgtttggcctcttggacacagaataacagtcctgttagtctcatcagctctcggcaataggctatggctcctccttcatccccaagatcttgctcagaagtcccaccttctccatcctgggagcagaggcatggtggtcctctctgctgcttgtaggacccatccatgaacagtccattaaagctgtccataacccgaggtgaagggatttccactgaacccccgttttgctcctggctagccagacaacagatcaaaatggtagatacgatattctcccaatttagtcaagaccaaggctaaggcccaaaaaatgaggtaagggcacttaaagaggataaggagatgaggtgaagaggagagtagcctgctagcactttcctggcctggaagggagcaatcatgttgaaacccagccctgggcataaacacagcaagcctgggagagcaaggaatatggttgattggactttgtggttaacttggagaattgcaaaggtatctgattgtttcgaggcatgttgtcacaaatatttgtaaaatacaagcactcattttcccgtcttatgaatagcgcaacagagcctagtgaatctggggactctgaacttcttgatctcacaggataccaggatcccccttcaaccacaggttctcaggatttggggctgcagatgctcacactgggtctgagatgcccttgggagcttcagccaaattcctattgatggcctatgcattataggatgtttagtagcatccctggcccctaccctctagatgccagtagcaagccccaccaagacatgacaatcagacattgccaactgttccctggggcacaaaattgcccctagttgagaaccactgcttgagaggaacctaagttcctggtagcttttcagagccrgggggattccagtggaggggtccaggcggtgggtctgagccctttgtgtctgacccaggcacgcatcgaggagctggaggaggagctggaggccgagcgcaccrccagggctaaggtggagaarctgcgctcagacctgtctcgggagctggaggagatcagcgagcggctggaagaggccggcggggccacgtccgtgcagatcgagatgaacaagaagcgcgaggccgagttccagaagatgcggcgggacctggaggaggccacgctgcagcacgaggccactgccgcggccctgcgcaagaagcacgccgacagcgtggccgagctgggcgagcagatcgacaacctgcagcgggtgaagcagaagctggagaaggagaagagcgagttcaagctggagctggatgacgtcacctccaacatggagcagatcatcaaggccaaggcaggstctgctcggcctcccctcgccctctcccctgcacagcggagcctcccccatgccttctctctctgtctgccatctcccttgtcattctcattctcttcatcaccctttggtctctcttcctgtctcccctgcccctctctggctctcctcaccctctctatctcttcatgttcctcctttctttaattcaagtctctcttcagactgcgccctcccacaccttctgtgtccccctcctgccctctggcattccccatctctgaccctctcttycttcctctggtcgactcagcccctcccacactcacccttcctgtcttgcttcctgaaggcaaacctggagaaagtgtctcggacgctggaggaccaggccaatgagtaccgcgtgaagctagaagaggcccaacgctccctcaatgatttcaccacccagcgagccaagctgcagaccgagaatggtgggtgcccctaaccaaccccctgcctagggcaggacatgacttgtgaaatggcccacaagcccctcatttcacctccaggagagttggcccggcagctagagsaaaaggaggcgctaatctcgcagctgacccgggggaagctctcttatacccagcaaatggaggacctcaaaaggcagctggaggaggagggcaaggtgaggcccagtggggagggtgggcaggcttgatggcagccctggggcaattcatctcagtgccagaaatggagcctggagctggaaagagtcctctgcaagggaaagaccctccagtctaggttctgccctgcagctaagcgtcatttaatgcctcttttcttaytcgtaaggggatggggtgagcagactgggaaactcctcaaacagtgaggtgccacatcagcccacatggtgaataaggctgggcttggttgaagtactacataagaagagaatctagagaatggggcacagggagtccctcccacctcctggtgcccccccccctccccaggcgaagaacgccctggcccatgcactgcagtcrgcccggcatgactgcgacctgctgcgggagcagtacgaggaggagacagaggccaaggccgagctgcagcgcgtcctgtccaaggccaactcggaggtggcccagtggaggaccaagtatgagacggacgccattcagcggactgaggagctcgaagaggccaagtgagctccagatacccccttaacctgactctcagagaggaaggggcgagaggacctggggtggggacaggcaaagtggtcatgagacggaagtggaagagacaggaggaactcggagggcaacagaagtgcttggaagaaagcctgaactctttgctctgtgaactctggctggccctgacccacttcctgtgacgggcgagcttttggcccgggttatacctgatgctcacgtataagacgagcaaaaagcttgttggtcagaggagctaccgtcgatcagcctgtgtggggggtgagggcagggggcactgacacccagatgccactgcaggtagggaggacgcctgggcagcccgtgctggcggactctgttccaggcatgagcaggctcagctcctgctaggctggacttacggtgtctcaaggagatatagggagggggtggaaggaggtccacccaaggctccagtgttgcccagtagagtcacacacacaccctccaccctcacctgggcagaaagaagctggcccagcggctgcaggatgccgaggaggccgtggaggctgttaatgccaagtgctcctcactggagaagaccaagcaccggctacagaatgagatagaggacttgatggtggacgtagagcgctccaaygcygctgctgcagccctggacaagaagcagagaaactttgacaaggtggaccatrggygggggccgcagccagcatgcagggcaagggggcatgaggggttcagtgagaggccaaaggcaacctccttggaggtggaggaggagggctaagcccaggctcgggaccagggacagatcttggacatgcggctgaggctgggggctggggcactgggaagcaggagggctggggagctaaggctggggggctgaagagtgagccttgtccccgggcagatcctggccgagtggaagcagaagtatgaggagtcgcagtctgagctggagtcctcacagaaggaggctcgctccctcagcacagagctcttcaagctcaagaacgcctacgaggagtccctggagcacctagagaccttcaagcgggagaacaagaaccttcagggtgtgctgggggtccaagaggccagagatgagttggtgggagggagggccatgcaggggcagggggaacayaggctttgagctttctggccctctggtccccagargaaatctcggaccttactgagcagctaggagaaggaggaaagaatgtgcatgagctggagaaggtcckcaaacagctggaggtggagaagctggagctgcagtcagccctggaggaggcagaggtgagggccgagaactccctgcaycccatccctgttctgccgctgtctcccacttctccctcacctgggggtgaccctgaccccaggacaaaatctattcattccatrttctttgttcaacattatctacccactattcactacccatgactgcctccaaagccaaggtctgcacaaaggaaaatgtcagtctgattagaggccaaaggttttgtttcccaccaggttttaaaagttggaatctggccataataataaccacttagacagtgggtaggagtgtggggttccagagtcaaacaggcctgagttggaacacagcttgaggactttcactgcrgcgttgggcaaaatctktaatctctctctgcctcagttttctcatctgtaaaatggaattaactgtacatacctcatatgattttacacatgattattataaagattaaatgaggtaacacatttaagcacttaatatatattagctattgttactcttcatttctaagcacctgggaatagccctgagttttctgggcttctaacttttctcaggaaagggtgagggacctggaaaacaagataaaattttgtatttgtggttataaaaattcctccattttctataatactttagacaggtcaggaatttatgcagtgttagtgctggagggtctggcaattgtgaggtccaaacccttttcttgacaggggaagcccagagagtccagcactttctccccaatagcaccgtggtgggcatggggtgcagatcccacctccccatctcttctcagctcttcttctctgggcgatagtcctggctgacaccgtgtatcttctcatcctccctctcaaccctgccctgtgccctgtctgcccgccctcrccccaccccttcccaggcctccctggagcacgaggagggcaagatcctccgggcccagctagagttcaaccagatcaaggcagagatcgagcggaagctggcagagaaggacgaggagatggaacaggccaagcgcaaccaccwgcgggtggtggactcgctgcagacctccctggatgcagagacacgcagccgcaacgaggycctgagggtgaagaagaagatggaaggagacctcaatgagatggagatccagctcagccaygccaaccgcatggcygccgaggcccagaagcaagtcaagagcctccagagcttgctgaaggtacatgggggcgggaggtcccctcaggggactggcctccatgtgscctggagaagcagtggtgtctggatacaggcaccagattcctcctgcccctgggttactgcagggacctctgacaggtgccctcagtgaagggcacckaggctggcttctgctcacacccactctcctgatgctcaggacacccagatccagctggaygatgcggtccgtgccaacgacgacctgaaggagaacatcgccatcgtggagcggcgcaacaacctgctgcaggctgagctggaggagctgcgtgccgtggtggagcagacagagcggtcccggaagctggcggagcaggagctgattgagaccagcgagcgggtgcagctgctgcattcccaggtgagggggtcaggagccaccttgtggaaacctactgagtgcagagcccaggacatctagaaaagccagatgttctaagtgagcacatctagccagggtcacaaatcatttcctctcttaggccaactctcatctgtggtggctgcagaaccattatattaagaaagcggtctctacttagaagctaagagggtcatgattgattgctgatacctgccaaagccacaaatctgggagtagtggaatgtatcctgttatttgatattcttgatctgaaagacagcctccggcttgctctgtaaagatgagagtttgggagtttaaagaagcataactgcatctcttgcaaaccaagctggctagaacaccattttctgcaatcccacccacactgttttcagttatactctgcaatgagactttgtgctcaccttttgcagtgccctgtggagttttgttctttaatctagtatgtgtgagaatgacatcatccacttacctcatcccctcttccttaccccactacattcttggtatagctataaacatctctggaatattgtcctggtaaaaagttgtttccatcttccttggaatattgtcatgctcctacgtaaacatgttgctaaagagctccagggtaatactgcagaccttttgctatttgaagtcttttttcagagtttagtaatcttagatacaatgtctagaatgtatgcactttcataggaaaagggaaagcaggtacaaaacgatcaatagtctaaaagtgggcttgttgtttwaaaaaaaaaatgaccacctttaattctytctggagaaagggtatgaaatcaggtaacaaagtgtagtatatatttgatcrtttttctctctccatgtctagaacaccagcctcatcaaccagaagaagaagatggagtckgayctgwcccagctccagtcggaagtggaggaggcagtgcaggagtgcagaaacgcygaggagaaggccaagaaggccatcacggatgtaagtgaccgcccaccttccgcctcccctaaagacagaaacaaggccttgggtccaggccaggccactgtgctgtaacaccaagccaactctgcagttctgtggatttgagggcctgatgggagaaaggagatccttggggggcaaaaggccccggcccctggcccatgttccttgccacctctctcctgcacacaggccgccatgatggcagaggagctgaagaaggagcaggacaccagcgcccacctggagcgcatgaagaagaacatggagcagaccattaaggacctgcagcaccggctggacgaggccgagcagatcgccctcaagggaggcaagaagcagctgcagaagctggaagcgcgggtgcgggagctggagggtgagctggaggccgagcagaagcgcaacgcagagtcggtgaagggcatgaggaagagcgagcggcgcatcaaggagctcacctaccaggtgcggcggacgccagacaccrggagtagatgtggaagtttcttctctggccccactgccccgccctcacagggctcctctcacctcctccttgagatgctgttggtagatttaacgttcttctcacgctctgcagtcagtttgacttgagtctatgagtttttccagcaaatgaagaatctacttctacttcctgaaaactcttctaactagtctttccccaggtttctttctttctttttttttttttttaataactctaagtgctaccatgaagacttcagaacagttcaaagaatccttccaccttcgactgtggggataagagtcaggggaggggaaaagacccggaaatcttccatagaacttctggcacacaaagagaaggccacagagaaagaggaccctagaatgctctaaaacctccacttgcatagctgagagctgtgcccttggcccgttattttcagtgtacctgggaagaaaaggccaaggagaygagggtgtcagtccatttgatagatggataccagaggcacaagaaagaggttacagatacagaaccacagagtgatttgtggacagaagtagaaatggcatcctggcacatacaatgataaagagataggaatgatcgagtgacgttggagccagtgatcccgatgcctgaattctggcccagtacaatatattagaatgtagaataatctggattatgataatacccccttctttctgcattctttttctggtcaagaactactggccaagagaacctatgtaagtccaggttggagctttatccaccatactggagctggaacagacctggtgcttttatattaccacattagggaattccattaggttctgagcccctccccctacttctagctttatgacttcagccttcattgctctgtggatccctgactgacaaccttgcattgcccctttgacctacgatagagtcagagaatcttccccaccacctctttgmcctggatcattgcagggaggggcagcaaaggcaaggggagaagagtaaaatgatggaggagggaaaggtgattgcatttgctccccctccaaaccagcttctcccaccctcycacccccagacagaggaagacaaaaagaacctgctgcggctacaggacctggtggacaagctgcaactgaaggtcaaggcctacaagcgccaggccgaggaggcggtgagttcagagctttcttccctttctcatcaacacacctactatttgtgagaaccaatgaatatctcctacagaggggcctggacaaagagtttgctataaactttaactctcaaacatttgtttgacacatctggtatgctcagagctgtcaggtgttctgaattaacaaaggcaccacctacaagctgcttacaattcagataccataacccaacagaaggcagtgtagatgctagtgcaggacgtggggcagccgaagctgaaggcaggaaggtggcggtggaattgggcctagaaggggacccagctagccacagggcagtggggaagacatctgggtggatgtgagttgctgattagcatgcctgcacaggaagctggggtccgggacaggtgcagcaaaacaggattctgaaggggcccagatcgggcagcatgggatttgtctggggcagtggatggccgtgaaggactctgagtgctggacatgtttgagaagagtgcaaggcagttgcaggatacccttgggaaggctgttgcaggaatatkcatgaggyatgggtgcctcagggacagggagctggaacctcaggttgagaggctgagaatcccatagcccatctccagctcattcacccatccccactgtcccaccacaggaggagcaagccaacaccaacctgtccaagttccrcaaggtgcagcatgagctggatgaggcagaggagcgggcggacatcgctgagtcccaggtcaacaagcttcgagccaagagccgtgacattggtgccaaggtgggtccctcccctgggcttcactagtcacttccacattagcatgccccctgatatgggtgcccttcagagtgggcactgcttgccctatatgtaggcagttctgagggtcccatagcttacataacctgagaatccactctcctgctcaaaacagccccccactgactggaacttctgcagagatccccagttccatccccctaaaccacaagtgcctctaacgtgggaccacargatccctggggccctgcctctccctccaagggcatctcccttaggccycwgaaagccccagggatttgtccccayacacttctccctcttgccagctgccccctcacacctcttattctttttgcagcaaaaaatgcacgatgaggagtgacactgcctcgggaacctcactcttgccaacctgtaataaatatgagtgccaaactctgcctgagcccatctgtccttcctgccagctgtccatcctggatcagggcagtagggggcctgagaggagggaggcccccagcccctgtatcagagctgccagagccaaggcatcccatatccacaaggaaggagaccgaggtgcagaggagtgaggtgttctgcctgacgtggacagctgtgagtcccagttctgctcagtcaaccacacaagggtggagagggagaaatttcaaaagtgaagaaaacaatggcatcaaaatggtgagccagtccaagatgctacgagayagaattttggtgccgaagttgaagccactctccacctaccccacccctgaggctgcaatgattaaakgtgtcctaggacacccattctttctgaaatgaattttccaccaatgccagaaaaggctcagagctggctgagaattaaggtatgggaaaggagatgggagagattccattctagtcagcccctaggaagtaactcccagggagccccctccctgtcttccccaggggtctccccctgcctcctatgattcagcacctcaccgtgagggcatcttgagactctggggccaatcracactgagcccaaaccaatatgccatgaggaccaagcctgggcattgctcatttcatgttggttctcacacagacacagatggcacaggtgcctgtacagggaaacactgtggtcacatttctgctctctctaagctcctactggggacagtctggcctggatcacacagctgcttgtgggacaggcccggtcctgaccccgttctgcacaaagcaaatccccactccccactgggctttgcagccaggctctgctgaccgcctccttaaccgttcacctggcaccccatctccctgactccccaagtggagcctcttctatccctcctctgagaccatgagaatggactgtgcataaagccctgagaaatgtgagcagtgaccagagaaacacaaaatcctgttggttctagcccaggagaggctgccagttctgatggtgagccaggacacaaggataggagaacaggaagcaggaggcaggaaaaagaccaagagagaggagtggctgccaccaaggaagcagagcgctctgaccagagttcaagatccagggttcgggcaggacttgggagctggggcctgcagctggaaggagcgctscagaagaaggattgtatctcagggcgggaacacacacacatcagcgacaggagatagcacgtcagctgggatggagctgctgagccaggccatgctgggctcctcgggctgggcaggaacgtctggctgcacatctgtctgtctcggcccagcagggctgactcccgggctgtggcagtgtctgctccaaactcccctgagccttcccatagcattcactgtrgggagctcttgaccagcttgtctctttcccagcctgtgagtgytaaagggcaggccccccgtcacctctgaggccctggcacccagcacagtgtgcatgggagatgctcaggaaatgtgtgctgaggagctggcaagctgggagggtggacccgcagtggagggaagagttggccattcttttctgagctacaaggaggctcagtacagtatccagaacactcgcttaggtgtcagaagagctgcgttctggccctagctctgtcacaaatgagttcacctcccctggctgggcctgttttctcttatgtgaaatgagggcattggaccagctgataatcaacggctctcccagcattcgcattttgggaaatctctccctcctctgatacctcaggctgccctctccctgcgtcctgtgggccaagtcttccccacaccacaagggggagctctgcacacgccccaggcgagcscctggcctccagcccactaacctgcgggaacaggtgtggtggtgcatgcatgctcccatgaggaaggctgtgccttctcagacacagaactccagatgcccagccaccaggcacaccacaaagtggccgtgcacacagaggtgtagcgtagaagttttgtgttggaggatgtcttcagcttcttctggctagcccccacatcctcactgctcagacccagtcccagagacagaccacgacctgctctggcaacattcccatgaatactccttgacattcctgacctgcctaatttctggggaagaaagagactcaccagtagaatttgaatattttaatttgggaatgacttagaggtccagattcctcccctccaccccccctcccccaataagttcccctcctctggccagagcttcatgagaagccacatcctggagcaccaggctccacagataagtccccagtgacgtctcaggccagactgctgtgtagggctggggtggggtttggcgggctgggggctagtgaatcccaaggagacgtgtctgggctccactgtcctctctggctggctgggcctaggagccaggtagccccagagtcactgctggtcccctgtgaggatagagccaggtagggacccacatcaggatgggtagctagggtggggagggcatctcctctccacagagcacaggcactcaccctggctggccccgggtgccatctcagtccggtagatcttgaaggcatcataggcaaagatggaaaccaggatgatgccaaaaacctgtgggagtgggagtggggatggcaaaacagaggctatagggccattgggttaaggtatagggtgaggtgcaagccagaaccccaagtcctggctgtggcttctgatacagaaagtgtgcaagcaccagcctgagctcttgaggggctaaggagtcctgcagggctgaactcacaaaagcagcaatggcagctccrtcccgggaggtcacagctgcaaaggagaccaccaggaagatgatgatggcactgacacagcgcaggaagtcctgggggccaggggtgcagggttaacaggacctcagaaggcagggggcgttaccctgaagttttccaggctagccagcagcccgaccctgagggattctgaacccctccataggatacccctcacacaatatgaagcacattcaagagacagagcgctcacactgctacccagggagtggaagcagatgaaccagagcaaccaggaccagaagccaggcgctggggctggaacccaggggacagcggctggagtatgccagcccgggggggtcaagccaggccagggctggggctggacctttgctgagtgggagagtagatctagcggatgtggtcctcctgattgcccgtggccctgcagctgtgaaatcagtgtgagtcaaagcacacctttgagtgcagggcatagcatgggacaaagcccagctgtggtgtggaaatggaaagaagctcggggaggaaaggaaaatgcatcatttagaggagagggaagggccccaaactgggctaggggtcagggttcctcaccagacagggccagttaattcggtcgaagcgctggtagtactgggtggcatagaggaagaggaaggcaagtgtgatgaagaactccagtagcgccgcggccatgtaggcagagatggaggccgtgaagcaratgaagatgatgagggtcagggcctgcaggaccgagcatgtggaacatgccaagaaggggacacaggcaggggccagggctttgccttcccctccttggaagctcccctaggctggcacctactacctgtccttggaggggaggaaggactctggcacatctccctatcccctggtgtcaggagccaccgttgcagggcatttgccggtcaagggcagtctccggcctcccactctgctcacccagcaaccccagcagtctggccaagccatatggctcccaggagcactatcccacagtaattcataggtacagtgtgaatgccagcccctggagttgtgcccacagagacccgactccacagggaccaagaggagccccctgcctcataatgctttccccacccccagatgcctgaaagccccctgacaaggaccagagcctttgattccatgccaagagagaaggcagatgctgcccagtggtttctgggagcccctttagctctgatgacctagggtggcatacgtgcagaggccttaactctacactgtggtcttgctaagtaaccaggggaagatcctttcctgagaagagatgtttctgggcagcagaccacagataaagtgcagttgcaggaagtctgccctttttgatagttagacttcttggacgtgctgagaagtggccatgttagaggctgtcattgcccctgtcccatccctatgtctcaagcttcctcaatgtcccaaaaagtcaccctgtctaactgcagtccttcctgctgcaactgaaacctgctgtaaatgtctccgggtggagaggcagcaagaaggcagagtaggagacgaagaaggggcagctgcgggcaggagaggtgtccagagggcytggggaaggaggmtactgaagggtgagctgggggctggcataaggctggccaggagccgggggtcagggagatggaggcaccaggttgggaggcagctgttaccagctcggtttccagcaggatgcccttgtgggaggtgaggaaggccttgtccaccgcgaagccctggagctctgcaactaccccctcctcagggtgccggtcccggcgatctcgagcactgagcatcttcgtagggcccaccaacacagccccctactgccaaaagcccagcaagagaaacagaaatctggcaggatggggaaacagacaggagcaagaaggcacttcgagaaacctgaaagtgaagcaggaggcttgcccacagggccccgggagagaaggcaggcgmtgggggccttgcccagatgggccctcacccagctgcccagagtgcctctgctgctgcctgcaccagccccctagagacccatggggaggggcagagaggaaggaggctctaatccctccccttgcttagagcccaacccagcctggaatagagaaggaaggggagaggaggaggtccgaaaagaaactgggaggagctgggatgtgagtagaggaacaggggcaggactgggagcccccagggacctaagcctgaagacatttgtgtcccccttctctaaccttaaccctcttgtttggccggtcctttctcccatttccttttagggagggtgtgagctggagcccagcccaggcagcacccccaggaccaagctgcagcagccaggactggaggacaaaggcggattgttgggggacaagggggcgctctgtgcctgctgcaatgcctcaatgggcctctgtctctccagcatgcygggagcgcggcctagcccccaccctggtgtttgggatgggccagggagacagasatgggagaggaygggagggtgcagcggaaactctggagggcggagagagctggcagggtggacagaggtgagggccaatggtggaaaggagaagggacaggctgggagaccgcgagatgttcaggcaccacggatgccaaatacagattaggccatttttaaataaagatatttatttggataaatctctatacattcaataacagcttcctcctcagaatcatccatgtcaaaagactagtaactacactagaatgcacccaaagtagatgctcactgagtgatgagtaaacaaacaaataaaaccaggggctctttcttctccagcamgggggaaatatctagaaagtgcctgtgctgggccagggtagcaggggatgggaaaagaggaagagacaggagtggtggcctmcagaaatgggcagaactttgaaaacctttcctgagagaaaatgacaggacaccagcttccggcggccctaagcagcagctgctcttttcaaaatgtgcagaagtgcaggytttccccaaagccccccatcctgtcccgggatcctgctgctccagacagcacttcacaggggccaagcatctgggcatcctggcccttcatggcaagtggttgtacacctggctccaggtttcccaaaaagggaccagcctcca

SEQ ID NO: 9851 - DNA, 321019 bp, Homo sapiens
  misc_feature (17913)..(17932): n is a, c, g, or t
ggcacacccatctcagagactaaccaccgcaaatgacaagtgaaaaagacagagccgttacagctatcctggtcgggtttattttcccagactaccatgtggggagttgaacatacccaccctcaggtcggggacaggctcgtgacgatgctcagggtagtggtggagccccagaagcctccagtttccattttggacccacggagatctccaggktgcctatcactcttggcccaggcctgggctttccaggaacttccccgattgatgttttactgaacgtggtgccgaaagttagtcacaggaagacattatctcagctgtctctgcgcaaatgctctctgaaacctccacgttgcttttaaagcatcatggagaaatgtagcatttatgccttgggagccagctatctatgcagagctaaaatagaaaatcttctcaagttgagtataaacagatcctcaacaagactgagactcttgttgcttgtggctgtgtggggataggaatcagctacagcatcacttgtatttttcctgcccttggggtgctctgtggagaccatgtgatgccttccacagctaatgcccctaaggaaagaccttaggcagatacacactgaaagtatacacatctgtagacagctgtgggcaaggatgttggagtttagcatctctactaactcacctaatagtaaaaacgggaagcattgtgctaacattttttttagaacagctgcaactatctaaattataatacaatcttaacaatttaacattcagatacaattatgcagaatgaagtgcacccatcttaagtgtacagtctgatgtgtttctgctaaatgcatatactagcatagccaacaccccatcaagatatagagcattgccatcacccaagaaagttctttatgcctctccctagtcatttgaaactttccctctctacccacccagggcagccatgattctgatttctagctctagatcaatcttgcctgtttttgagctttacataaatgagctaatacagtatgtactcttttggcttatacattatgctttggagactcatttatgtttttgcatggattagtagtccattcctttttactgctaagcagtattgcattgaatggatatatcatgatttgtttatccattctccttttgatttacatttgggttgttttagtttttgctattatgaacaaagcacctattgacattcccatagaagtatttttgtggaattttcatttcttttgggtaaataactagggctagacttgctggatcgtaagttagttgtatgttttaccttataagaaactgtcaaacagttgacataatgcactcttaatgaagcttattacctgtgaagtgaggtcttttaaattttttgtcttttgatttttgtcttaaattgcatcgatattagatgtgtggacattcttctgaaatatcttaaggatcagaccttgattaactgtgttattttagtagatctttaatgcttctgagttatttatacggacagctcgaaatctgaacgactcccattggaaaaccagaatgatctctttcatggatctctcccatatttttatttatcttctttaatgttttatacatacaaaaatatgtagaacatgtgttagttattaagcatacttataaaatggaaatttgtaaatccgtcactcaatccaagagtgaactcatttccaaattacaatggaaacccatgtgsctatgggcttctcatcctctccaaaggaattcacatccttcattaattcttttgctaaaacaaaagcaaaacaaaggaaaaatattattttattatttaaagcaaaaaaaattttctgtaacttttaaagttttccttgctttttaagagctttatcaaaatggtgttacgctgtgtgcgtttttgatatttgtatatttttactcagtgtgtttcaaagatctgcccatgttgtgtggggctgtagtttattcacttttgctgctaacattccyttctgcgaatacatcacaatatactgtattacttgatacttgtcaattgttgtgctgtttctcacgtttgcacttgatgtatatgatatacattacattttttggggagtctggtacatttagcagaataatttgagatgaaactgttatcaagtaaacggcgtttttaaaaaatgaaaacaagcaatcagtttctgctccaaaagagggagaacctataagatacctgagtaaaatggtataaaataaaaagtttggtgcattgtcaatgtgggtataaagcaaagactccaattaatttttgtctacatgattttatttcaaggttgaaaaaataagtttgacttgtgtatgtaaaatataatcattgaagaaatacaaatcacctcctttgtccatgtggtcaagttagagcgtaaagacaacctaaatttttgttccttttttttccctaaatattaagctatataatgatacatctcccacttcactgtttaaaataacttaatacgattgatttcctactacttcaggaaaacacaaacatttaaaaaattcacaaataaaaatcattttagtaaaaaaaaaacacacaaaaacaaatcctacaacccctacaacaacctatatacatttaaaaattctatagacctctttatgttcttggggacaaataaacaggcatatttattactaatactaaaaatacattgggtagtatttgaagattttatattagcactagccttttaaaaatcagctctaaatttttgtcttacaagtatgtattaaaaattctgaaatcaagtataatgaaattatatatcaatattcctttgcatttaaytccagagtggatctgcaggaatcaagaccaacctcatgcagagaacttaagaaatatttaaaaattagtagactggactttaattcttcatgtgtagtgcctaatttttaaataatacattttaagattctaataaatttatttcactgttaaatctaggaacatccaaaactgaaactctttatttaaaaatcaagctgaatttcagttaaacaaaaccatcccatcatatgaataactttcttaggtaaaacaaggtttattttctttctatacaactgactctgaattgagctagaaatttccaaggaggaaaatgatctaggaaacaactttagaaaaaaagggctaagtttccgttatgatagcttttgacttgttttcagctcttaaaaaattatttacgaacgatggatacacgttctaatgcagaagtattttagaattagagagtaaaagaaacctactaccttcctttacatcaggtcccttcttaccatcctacccgattgtttgagacaaccacttcttatctcgacaattcacaactcttttattagctatcttaaaaaaatttattactggcatcaattagcctgagtcatgaaaccggaccacattaagggcgacacayggtccaatcactgtttgtaaaagtccacgtatttcaaactcctctctcctgccactgctgrgctgtttccctctttgaggacctggtctccgcagcatttattcattagatggcagtcctaggggagtctcgctttggggaaacctctsctcctgcacattcaagaaaacaaccgcggagacttagggtcggtactggtttccagtcacttacgtagcaaacgaagcaagaggaacgtgcctgggaggacccgagacaggtgcgggtgggtttccgcagtagccgctgatcccgagtgcatgcggcgtgttcccgggtcgggaccgcrgccaagggaggcttcccggccccagcctccaccccctcctcggcgccccgggacccggacacgccccccgagcttcggagacccgcagcgtgcacgcgccccggccgctccccgcagccgcccacgtggtggagccctgagctgcgcgaggccgcggagagcgctcagggcgggcggctggtccgggaggccacgccagcgcgacccagccgagtcggcccccagcccgggcccccacatttcctcccccggagggagggaggcgactctccgcgggctgccctccccagcgcccgccgcgccctctggcggccgccgcggggacgcgcccggggcacgcggcgctgcctgtctgggccccccttccggggcgcggggcccgcgaggggcggcggggtcctctctcctcgagccactctgggccgagccacacgggccgcgcccttccccctccgctccccctgagcccccaaactccgggctccacggtcgcaacgccgcgggcaccccagcctggcgtgaaagtgcccggcgtagtagcctgggggggggggtcccctttctcccaggtgcgccccttccgccacgttcgggctttccagtacgcagcgaaaaaaatgccgcatgcacgcatttatttattttgcaacagctgcaakaaacaatgaagcttttcaagaaccggggaaacgcgctttccagccgcgctgttgttgttttcaatgaacctctcccagccccgcactccccgcccacccctcccctctcctgcccacccctcccctgcctagcctttccctggctacccacccctgccccgccgagaccggaccggcggcgggggcattgtttttggagtcgggcgggaggggagggcgcgtgcggggtggccggcgcagtgcggtgggggcgggagcgggtgggcacgcgcgcgtgtctctgtgtgcgcgcgggaggcggtggggcgggagatggggggcggcgcctcgcagtctcgcgccccacgcccgggctccgctccgcacgtcttggggaacccgggctccggttttttgcgcgcgccggcctgggccgggccctcggcgcgccgctgctgcggcggtggccgctcgagtgtgcgagcgggcgcgtgtgcgcgggccagggcgcgcgcgcgcgcgcgcgagcccccagtgtgtggcagcggcggcggcggcgcggcgaggctggggctcttgtttaccagcattaactccgctgagcggaaaaaaaaagggaaaaaacccgaggaggagcgagcgcaccaggcgaactcgagagaggcgggagagcgagagggacgccgccagcgagcctgcccacggccggcgctcgcagaccctcggccccgctccccggatccccccgcgccctccacgcccctcccgcgcgggggcagctccacggcgcgcctcgcctcggctgtgaccttcagcgagccggagcccccgcgcagagcaggcggcggcgggcgggggccgggcgggggccggcgcggggcgggcggcggcgcagagccgggcggcgcggcgggagtgctgagcgcggcgcggccggcccgccgctttgtgtgtgtcctggatttgggaaggagctcgccgcggcggcggcggcgctgagggaggaggcggcggcgagcggagccaggaggaggaggaggaggagggggagccgctcattcattttgactccgcgtttctgcccctcgccggcctcgcctgtgacccggacttcggggcgatcttgcgaactgcgtcgcgccctcccgcggcggaagctcgggcgtccggccgcctcccgcgcggccagggccgggcttgtttttcctcgcctaggcagatttgggctttgccccctttctttgcagttttycccccttcctgcctctccgggtttgaaaatggaggccgacgacgccgacagtccgccccggcgcgcctcgggttcccgactccgccgagccctgggccgctgctgccggcgctgaggggccgccccgcgccgcccgccccgtccgcgcacccggagggccccggcggcgccgccttcggagtattgtttccttcgcccttgtttttggagggggagcgaagactgagtttgagacttgtttcctttcatttcctttttttcttttcttttcttttttttttttttttgagaaaggggaatttcatcccaaataaaaggaatgaagtctggctccggaggagggtccccgacctcgctgtgggggctcctgtttctctccgccgcgctctcgctctggccgacgagtggagaaagtgagtatgtgcccgccgcccgcggccactgcgggaacttttcctccgaggggctgcgccctgtttgcgaaacccgagttgccaccgtcgcagctgtcgggcccccgggctcgggagcggcggggtggggcgcagggcggctctgccgggagggaggctgcagcggacccgggacccgggctcgttcgtctggagccccgcgggccctggctccgcgcatccccgcgcgggaagggcttttctctttctccgtcctgacagcccagccgtgtttcccggctaggcgcgaggactcggtagggaagttggtgccggggcgggctccgcggttcccgggccccgcgacccgcacctcgccccttccrtgcgcamgagcctctccgcacacagcgctgatccccctgcggcgcgcaggcagcagcgacagcaccctgggccgcaccgcgtctccgctgctggggctgaccgggcagtggggagcgggcagccgcccggcccgcggggtgcgagttgccctcgagggggsaggtgccctgcggagaggccccgaagccccaggacacgtctccaagcgcccgtcgctgcctcccgtcgcccaacgtgcttttgcccctcgggctcctcgggttcctggccttgcccgtcactttggcccgctcctcgttgggttacctgcccccggcgtcccrgggctgggcggtggggtgaggggaagcgctctctgggcagccccccgggaagtgcgaggccgggagtcttcctcagcttgtctcttccggggagcgccactgggtccccagttcagagggctctgggatggtctcccagtttctcccgggccgggggatggaggggtactagggccgcatccgagtgtgcgttggtgggtgtgtggtcggagccgacgtgcattccgacacacgtgctcgcagcgcggggtgtagtcgccgcctcacggggacacctagacgcccgtccctggcgagaggtgtcgtacgctgtggtttcagcgccagggtctgcggcggcgcggggagggtgttgtgttttgcgagcgcggagccctggccttggttttgttgtggtcggcgtcgtgtcgccctctcttctgccgccccgcacttcctttgtacgtagttaataagcagtgtcgctccacattcgctgtcttttgcaatctgatagcttttgttttggtggtgtcgggtgggggttagtagggaagcgcggggatgcggggagcgagaactccccccggtgtctacggccggaggaggtgggggttttattcttctgaaaaagttgaaagtgtggcttactggtacattcaagatggtagggtaatttgaacacgattaaaagtttaaatgtcgcagaactgggactgggaacggtgagggcgtgttggtgagtaatggttgccgagggtatgcaggtggtgccgattaactttgaaaaaatcacgactgagccttcacgagtgaggcggggaaggaggaggcagcggaggttgtatggccccatcaccggggcaattcagaaaggctgtttctataaacaaatccttaaacgtctggtaagaaatgagtccgcgacggaacgagagcakatcgtggttcgcgtgtttactgccgagtgggacgcggactggggccggaccttccacagatctgggctctcctgctctttgttttctaaactttcagcggactcgattgggcgaaagccttccggctccctttactaagtcgtttaggtggtggctggggggacaaagragggtttttatctttaaaagataagtacggtttagaagacacgggagaaataatccattttgttatgttatgcagttgaactgtatagcttctctagttttgtgtttttaatgttctgaaattcaaaacagyagggatggccttcgccgacgcaggagtcgggcattttaaaataggctgtttttcttttggagcgttcttcttgaaggatattstttgtgcaagacggcgatttttgagaacacaggcagragggagggggtgttttaatgtatgtttttactccatgataccaaagcttccccccaggatccctttacagtggttagttcctggaaacctgatgggtggtcagaaggcaccccaaatctcgattatggtttgctgaagtcttgactgactcagtacctgcccctccctccatctctgaaatgtggagaattaaaagctatgcctgtgaacgggcgttcagtttttagcsgggaaggtgctagaccacttaactctgatagaaataagctgctgagccctatcagggagggcgttctttcagctgttgtctggtgragaaawaaagacagggtgttggttcagttgcaggtattttgctggcgtattgagagattagagtttcctctttgagtgtgatggcagtagaaagagtgttgtttatcttagaaaacttagtttctgaagcagaggcagtcatatggatgtgtttgttttgtatcaccataatgtgaacagagcatctaaatgaaggcggttcggaggttctgagtgatagccagataatctgagggctattttgtttttaaaaagtcagcatgcactttaaatttattgtacccatctccttaaaaggattcagtcatctttctaccccaggcatcctgttgtcacagaaatgtaggtatgtgaaatgttggtgtttaaagaagttagtgttttattaccagaaggagaacccagaaaaagaacttctgaaagaacctaaacagcaaattatagtttagatcctctggagagacatagcaagcaaatggtgttttgtggaagggtggggtttgtgtcaggatttgaaatgtaaaaggtcataatgtttgatttgtcgaaaaagattagaaaagttcaactctaagaaatatgctaaggttgaatagatgaagcttaaaaatatcacaaaaagtgaaagaagtcagtcacaaaagaccacatatcgtatgatccggtttatgtgaaatgtctaraataaacaaatccatagaggcagaaggtagatgagtggttgccaggggctgggggcggatggaatggggagtgactgctrgtgggcacagggtttctttttggggtgatgaaaattgttctaaaattagtttgtggcgatggctgcatagctctaaatatacttaaaaccattggattatrtactttaaatcggggactttaatggtatgtgaattatatctcaataaaccctttttttttttttttaaagaaatgtgatcaggttgaaaataacttgttatgctaccttaaattacgttaaaattattacatayatttgacaggctgatgtctctctctcttttcatttatgagtttttcagatccgtgagttgcagcaatacaacaaactgataattgaagcttagcaacagggattcaatcccgcagtagaaatgggcaagcaggagaaaaagaatcttggttctatgtagcttcagttagggattgaggagctggatttaaaaaacacaaatgctggtggagggcagatttttgacaatagaaacctcagctgaatctgaaatgatggtttttttcaggatagagtttaggagctgagtctgaagggctgtttgtatttccagttttattatgttttccaacaaagaaagacattgctgttttaagatgttttaaacactcattttttgatatgccacattgaccacaagtggtagtaaggactgaggatgaacagaacagttcattttaatgcagtattgttgtttcttttctttgcagttttattttatttcttacatagttccagggtctgagcaggagaaagaatctttaggatgcagtagttttaggatacactgtttcaagtatacagtgatttttataaaattaaaattccttacagaacgaaaggttttaaaatgtggcaaaggcatttttgttttgaaactgtgtgcatttatccagatttaccctggcctttcaataggaaaagacctagagaataattgttgtttacatttgcttttggtctttgtctaaggcttagtttactaataaaaatgtttcctgcccttcctattgttgcaagatcagggcagtaatgaaaatcaactgtatcattttcacttgttgccttagagtttttgccaagaggaaccctcaagggacggtggtttccttttaaatctggtttcatttgttttgtaagaatgtgctgtaagaagcaactgaatccagcctgcacttattgtgcacctactgtatgaaagctgaccttgtgctactcagtgcatgaacctgcagagtcttgcatgaaaccacctttcttgaaattcagattttttttcagactcagtatagggtgcagttttcaagtagacagtagttagcattttaaaggttcttttaaaaatatttctgtagacttaggactctagtgttgttcatcagaagcctttaccctataccttttttgcctcattggtgctttccgttatattgggatgtcactgtagactgtgacatacaggtgatgttaacccatcttgactggcggcactgtcttctttataacattggatatggcaattgtgatttacaaactgcagtgttgtagttgcctttttccaaaaattaggagtcacaggtgtgtacatgaacgttgcatagcatgttttgagttgtaagaaagatggaacttatttcagaagttttctggattacatattgcttagttagctttctagaaatcaggaagcattcataatttcagggcattttataatttgtaaataacttggtgtttttaaaagcgtgagggagtaagagtgaggagacaaatcctgaaagtttttgttttttaattgtaaagcatacaagatacatttctttataggttgtgattttccccaatttgttttcaaaactcatttaaaaatcagacctagttcatggaagaggtatttgcgcctgtgggcgaacttgatttgaactgcttttcttagccagcttaggacaggtgctgagtccaggggatgagctcttctcaattgtactaaatatataatagttgcacacatgttacggatatagtttcttgatttccagtctgagatgttctgaaggaaaattctgaacactttagagacaacaaagtgcctaatgagtgatgcactctgatccctcctggaaaatggtgtttggcatcagcttagcaagaggaggttttccagttatttgtaaagatgtgatgtggctttaagtggggatgggggagggtagcagccccagtgtttgtggacattgagacctgttgacatttgggaagcataactgagttccactatttgaaaagattaaaactttgatatatgtacacatcccctcatgcctgcacccccatccccgagggtctggaaaagaattgatttgttctgaggaaggaacatatatttggaatataaaatggttagtaaacaaaggatctttwaaacaagttagattgttatctcaagagaagcatacttcctcggcatgatgttttcttttgttaaattgctttggttttatttgactcaaagtattaacaatacctttgattttgagacttttggacttttgaagactaagtttttaaatggtcaattttactcgtttgaaagtcccagataccatttttgaagatttctctccctttttttccactgatgccggctttacttatgttttattttcaaatcttaaggaaaaactgatatttccttacttgaactgagaaatagtcgttttccctccctcttttcttccacagtaaatacatgttgagtacttactggatgcagttctttaggtttagaaattatttgatactgtaaaatgtcttaccataagtttttaaagatacccgtcaaactatagatgttactgccatgtttattaaaaaaaaaaataaaacgaaacaaactagtaagcaagcttaaaatttttctttttcctgccctggactacagatttttttttcttttttttttttgagacagggtctctggtcacctaggctggaatgcagtggtgtgatcacggcttgattctgccttgacctcccaggctccagtgatcctcccaagtaggtgggactacaggcacacaccaccatgcctggctaattttttgtatttttagtacagacgaggttttgctatgttgctcaggttggactcaagcgatccactcacctcggcctcccggagggctgggatcacaggtgcgagccaccrcccccagcctacaagaatttgtaaactcatagattgctcttctgttttcactggaccacaacagaaagtagtttcttttatggtgagggatgaacacctacgattgcaatataagttgttgggccttgtgtccatggagctcacttggtggttggtggtcttgaagcattcacattctttggagtagtggggcggctggctagtcacatggggaagatgtgcacacctgtggatggggccatcacacactgcagcgatagctgggcctaccttactgctcacctggctgggcacagcggctcctgcctgtaaccccagcactttgggaggccaaggtgggcagatcacttgaggtcagaagttcaagaccagcctggccaacatggtgcaccccctttctactaaaaataccagaattaaccgggcgtggtggcccgtgcctataatcccagctacgtgagaggctgaggcaggagaattgctgaaacccaggaggcagaggttgcagtgagccaagatgatgccactgcactccagcctgggtgacagagcgagactccatcacacacacaaaatacatatataaaaataaattgctcacctggtaatagtctggaaaacattttttttttgtttttttgcatattttaaagactttagaaagtagtcttgctaatccagaaagttcttgcggggaggagtttgaaactttgttttatctcactcctcagtcttagcccccttaataccataggtctctacttcagtaagagttacataatacgaatgccgtttgttcagaattgtgtatctccatccatccgtccatcgtccaaattctgcragtttgaaatacattgttgttgctgttttgtatacttttgttcaaccattttctttttaacatggcactagctttctcaaactggctttggaattatttgtcagtttaaaaataaataccactttaaaaattactcttgacatgggagaacaaatatattttgatagttgttagagcataaatattttatagagcataacttgaaatttttcctgatacattgtgattgctttcagcttgtcctctgctgtaaaaaatatagtcgtggttagtctctgtaaagttggttattgggaatatgtgcttgattacgtaaatgagacatcaccaatttaagtcagccaaagtttagtcaatagaactttaaagaacagaagtctaatggtaattagggagagatgaatttatttrtaggagttttccccaaattcaaagcgtcttagtgacctttgataacttcctggaaaaagtaggaagcatggagagaaattccaggtaggagcccatgatccaattgactgcatcagcttacaaagtgttttctaagtcattagctattaattctgtctagattgtaaaatccctctcagttgtgtccacatttatctgtgttgtcctgtatttattctctttacctaatttccctgagtctcattttagtgggataatacacaagcttacagactcaggactttaaagagaagcacagattgccacgaaaacaaatgaacacagagaccagtagcagcagagggagatctgctgtgaggcttcccttagttctgttgtctgatttctgtggataatgagttcactgcatatgttaggtcacaacatgatatcgtgtagtcgtaggtacagaacttttgttatggtagcctttcttcgtcaggtgatacaattgggattttctttctcacatgcacctcagtaaaattttcagcaacagagattggctcaggatggaatttgttcagtttcagttctgcagcctgtccttttctggggagactcattaattgaatgttgcctttcgatctcactgagtcacttgaaatcgctcagattgacccctattccgggatccagcctggtccagtgcagacctgcattgactctgactacatgctgagttggcctctgaaccagttcctgtaccattcccttagtctgatggacttgccagctccaaatactcagaacgtgcctcttgtggtcctaggatcaagtccagggtccttagaatcaagtaatgaaacaggtccttagtaatcctgtgctgtagggatccactgttagttcctggtactccccagcatctgtgcattagcttgatggaaaggaagctgtgttatgcctgtcttcaagtttttgcttctgctgtttccatagctgagaatgtttttcctcttcactactctgctacttctccttccatcctcaatactgaatagcagaaagtgccgcttaagaacacaggaaggtcaccatagctttagtttctccttagctgccaattagttctttggtcctaaagttattaacttttctgagtcttgatagaaatgcggagacttaaaaatatttgggggagacatttctccttttctcactaaacaacagaatgaaaaccttttctaacaggtttagaaaaccaaagtcagaaaaattgtgaggaaatagaataggttttttaaattgaaataatttccaagttccaggtggatctgtaaaatagggacaagatcataactttcaaaaggcagcacgctaagtcaggtgattcctttcccccatatgccttttctgtggtttgaataggtcagagatgccatctttacatttccaagtcaaattcctcttccttcttgaaggtttttgggatttccctaacttgtatagatctactttcccattactccttttgagttcataacccacggttttgctggttgacagtgatttgtcttgttccttgcttgtaattttattaggaccatggagccaaagtggctggtttgaatctcagctcttcastagctaagctctcaggcaaataatttaatcttcttgtgcctcagtttcctcatctgtgaaattataattttaatagaatctactttaaacattcatagaaatcaaattcgtacacatgtcaagtgcctagaatagaacctggcacctggtattaagcccttggacttcaactgctactgttcttagggttgtgacatcctcgaacagagatgttctttggatagaaatataaggcttacttgatgtttgattgtccttgccatttaaatatgttatagaacctggcacataggtgctcaataaatgtataataaaactttattttgctaaggtgtttattaacaagatggcatgttgcttattaaacagttgtgattttttttttcagtaaacgatggtcatccccctgcagtttgccttccatttcagagatctgtttattacactttctcccttaatattgtcatttgtcaatttctgctcacacctgagaggtgtccagtgtgcactttgcccatctcgcctatgcataggctccatctagtggccagaagggaaattcagcatattaggtgactgaattaatagtgccccaaggaggaagatagcgatcccaacccactctctggcttgcttcctggggactgattgcaagaaaatgtggatactacagacttctgtagaaatcactgggctacagttttggattaaggttactctactgtgtcagtgcgagctgtcctgagagaattagggtcttcctaagtgatgcagacaggcgyactgcaactccatggcagagctgttaacacctagtgtgtcttttacagttagagttttaagataattttacaggactttaataaatttaaagctccaaaatatttgagattagagattaaaaaaacactactgatttcatttggaaaaatacagcaagatttaccttccattgctctatttaaacaggtagtaacactttcattctcttctctctcccctttggctattctatgtggttaagatgctcgccagccagaaatactcacagagaataagaataaatacatccagtgttgtgttaggtcccacaccgtctatatttcgctagctaattttatgtattttgtttcatgttttattgatattttcagaatctttcttgctgagattacacaaaatatatagctggttattcagttttacgtgtcaaaagccttaaacctgtttccccatgattgccttttattatttttaattcggaaatctttgtttggctgtctgagagagaacttcagcctcccttcctcccagacattttgaacagttcaggctgtactcattcgtgtctytttgtcttggcaggtggaagcccctctgcttggaatagcaaacaatactaycagcttgccctctggcaagctcctttaagagttagctgtaatttcaccctctctctggccttgattctgcatgcagaatgattgcactgacttgagctcctgtggtctcttgctatacctcctatttgggcatctcccccatattgctttcccccaccattggggaggggaatggtaccttggttatctttgaattcccaggaggtggcccagtgcctggtgcataggaggagctgaagaaacggaagacttcttaaagggatactcgccattcactttgaagcacttctttgtacaacaaatttattttcatctgatcattgcacctctgctagccaaaacattttatcacaccagttactgctgcatggaacttgaaagcaataaaattwtctttaaaatcattgtttgattaggctttttgcacattgaggtgaataaaaaaaattagaactcctggaagggtaatttgtgagtctggccttgtgtcaagatcacctcatccctgtrgatggagactttgttccataagttccctatagataagatgtaatgaataattcattggcaccgatttatgtctgtagtgtgcttttaaaccctcytggagctgggttcctgaggaggaagcatctgcaggctggactcggctgcctggtggtctccggagtggcctggtgcagagggccagggtggcatctcagaaagttgggtgggtagggtrcttgcacacctgctgaccttgagttacagggtggacctaggtcatttcacaggcccttccagccttcagatctcaagatactaggcagagagagagatggagatttgagggagatgtggttggaacaagcagaatcaccacgtatggaagttggcttctattttttgcattgttttcttggtgaggccagtaagcttttgcctcactcctgggagggacagtagcaaggtcttacaggtctctctatcattgaagcaccctcyccaaccctgccggttttggttgctggtgaaggcctttgacagtgtcctggtagggcgacggtgaggccagctcccgacctctggacagaagaaagcttacttgtctaggttggtgtcaaggggactcctgaacttaatgaacaccttagaaattatccttaaagtctcctcttccgaggagtggggtggnnnnnnnnnnnnnnnnnnnnaatgtaaacataatcatttgaagctggaatgttaatattcaagagtagcttgtaaaaaagcatcttgtgaaattctcatgtgaatgctgaaccggctggatgtgaacttagctggacagcctggcctgtctttgctctgctcttctccgtgcggtttgcatatgtgcagggcttcctttgaagccttgtcccctcaaacaattcactgtctccctctctcccacgcatggaggcatgttggaaagggagctccaggcctcagtgtctctgcctgtgattggaataacactgctctagcagggatgccaatgagaattagcaatagataatgtatccaagctgcccagcaaacctggcaaatagaaagcatccaataaatggatgcttttctctttttttctcctcctcatggtgggtggccctggtgggctctctctggggcctccagtcctccttccccacaacactggggaattgctgccagttgaatarggccctttttttttttttttttttttgagacagtcttgctctgttgcccaggctggagtgcagtggtgcaatctccgctcactgcaacctctgccttactgcaacctcttcctcccaggttcaaacaattcttgtggatcagcttcccaagaagctgggattacaggcgtgtgccaccacgcctggctaattttttttttttctagtagagacggggtttaggcatgttggtcaggctggtctcaaactcctggcctcaagcaatccaccgacctcggcctcccatagtgctgggattacagatgtgagccactgtggctggccaaggagggtctttttttgcacatctacagtgaaaggtttgaacccggacgtctgagtctcaggtcagttgttgaaaccactaagtaaccaccttgcttctctgtgcctgaagagaatgggtttttaggttaaccaggctgactggttcaaggtcatgtccctatctgtggaaggggagtgggagtggaaggtgagtggtgacagagtatggaaccctgtttctgatatctagattatttgagggcctccagtggtctctgctccatggaaagcatatgaaagaatatgattttttttttttactcgagcttgttgtctagttgggaaaactcaactactggtggagagtaacagatgctatgagtttagtgctaagttatgggatgctgaccggagagaagtatgtgggctgcaggcagtggggtcacggaactgcagaatggcttgagaagctttaaggaggatgtctgactttagtgtgccctaaatatttgactctcaagatccaaggaggcagctccccaggagaggaagggaccatgtgtggtgtgggtggcagtgtgcactgatggagtggagagggtgtcagaatccggtgtttgtgtggtgggaaggaattgactgctggctagagaatgaggagygctgaaacctttgcaccattgcagtggacccgctgagaagggtgttctggggaggctgctctggtctctcgatggagtcaggattgggggacagatagacaccccggtgtgagccagtgatggtatagatgagggaggcagtgaggacaggctcagggagggaagtcttgtctctagacctgagaccaggaagcaggaatggactggacaggttggcccasctgagggaggtgactggtgagatgggtcctcggtgtgaggggctgggttgccagaggagctgtgggctggggtggtttgtcgagagagcagtcccagttgatggagaggcaggacccgcaaaacaggttggctgcaggactgggggcggtagcacagggcagctcccgaggagacacctggcacttttaaggcatggaatggagagagctaggggagagcacacctgcagtgaggcaattcacatagcaaagttctccggaaactgcagtgttcaacttttttaaagaatagctggatgttagaaaagtgraggaactgtcacctttattaggggcatcatggatacctggtagcatcaagggctagggttaaaacccgtggagtaatacgccctcctattgtgttcctctcctctaaaaatgaaggtgaaactgtttcaggtgagcgctgttgttgttcrtttgctggggcactgctttctgatttttagaggagtccaggctggagactgacccctgcctttttctgagttgggccggctgggcccgaggctggttctgggctgggccaggctgatgcagtggccttgggcttcccgaggctgggagagggcrgtggcccccgctaccctgaagagctggccaacgcggcagggctctttccagtccttaccatgcaagtgaagaggaacagtttgtttaaagaggggtgccagcttcacatccaggcctggactttgctactggtgcttttgaacttgtgttgatttatgtttgtaaattgactggacacattgtggttcttgatgagaagcaattgcccatccttagcccacgattagtgccactctctgggtgctgcctgttctgccactgtaactgttttcacttgacaaataacattaaaaaacacagttctgcaagagacttcctgggagggtggtatcatttggcctgtgggcttttgtaayactttcctgctattaggagagtgaattctgaattttcaatcacgttsacctgttggagcaagtagagtttcagacggtctccgcttttctcgactagaaagcaggccttctcccttttccccccagtcttgtttcmtgacaccattcccctctgagatgagggttggagaattagaagtctactgatgcattgtaccggggcacgttattgaccctctctgctctcctttcctcatctgtaaaatggaagataatgccacccatcaggccgagtgcggtggctcatgcctgtaatcccagcactttgggaggccgaggtgagcggatcacctgaaatcaggagttcgagaccagcctggctaacatggtgaaaccctgtctctactaaaaatataaaaattagccaggcacagtggcatgcacctgtaatcccagctactcaggaggctgaggcaggagaatcacttgaacctgggaggtggaggttggaggttggaggttggaggttggaggttgcagtgagccaagatcgcgccactgcactccagcctgggcgagagtgagactccatgtcaaaaaaaaaaaaaaaaagtgtcacccatcttggrggatcgttaccaatacttcatgagtgaatacatacacatttcttagaacctagggtttataaacactaggagttagctgatactattgttgctaaggatagaggaaatacgcattagaagttatttacttcctttaaaaaaaaaaataccctttgggtgtgtattgattctgatgttttgctcctagctacatttgccgtttttttttgactgcagaattaggaaccagcttcatttttttttttttttttggatggaatctcgctctgtcgtccaggctggagtgtggtggcgcaatcttggctcactgcaagctccacctcccgggttcacgccattctcctgcctcagcctccccagcagctgggactacaggcgtccgctgccacactaatttttgtatttttagtagagatggggtttcaccgtgttagccaggatggtcttgatctcctgaccttgtgatccgcccacctcggcctcccaaagtgctgggattaaaggcgtgagccaccgcgcccggcaggaacccagcttcatttcttgtaaagagagtttgacaagcgctccactggggatagcagcacagcttcctccttttctgtccctgtctccctcctgactctgcatctgcctccgtttgaagcatcctcctccagtaagtgggtcatttggattccaaggcccttttgaggccatggtgatggatcatttgcgttatcaatgtgaactgtggatgtcccttcgcccttcagtctcttccttcttcaaggagggggaggtaattgggggtcatgtggcctggggaagagcctggtcacgagcatgagggatgtgagtgggactatgtttccagccaaaatttagggcacaggatctgaaaaacacttagattaagtatctgcaacacaaattagggtattttaaattgaatgtggagaaccctgagaacctgtgccctttgtgcgtggatggctgcttgcaaggatgagcatccccagctggagcggcccatggctgccagaacaggagaaggcttcagtcaggtgggaagccagctgcagtgtgttgcctgatgcaggatggtgcgagaaggagctgctctcttgctctgctccctggatcgcacaaggtcttcctgagaccagaattcaaggttagtcctgtttaggcaacttggtagatggacttgaatggtctttgctaagcgaatattgcctatggtggtatttgcaaggaaaacaaaagtgttttgagcccagactaaccaatttaacaatgctagtaggtaaggatactactgtttgctttctgtgatgagaggtctcttaggaggaggggttaattcttttgatttaaaacttactacttgaggcaaataggcacatgaaaagatgttgaaagtcactagtcattggtgaaatgtaagtcagacccacaattggtacttcatactcattagtatggctattaccaaaaacaccagatgatagcaagcataggccaggatgtggagatgttggaacccttgtgccttactggtgagactgttaaaatggcacagccttttttttttttaacaggaagatgatatggtgcttcctcaataaattcatcatagaattgccatatgatccagcaattccactttggggtatatgcccaaaaagaagtgaaagcaggggctcgaacagatatttgtacacccatgttcatggcagcaaataattcaaaatagccaaaaagtgaaagcaactcaagggtccatccatagacgggtggataaacaaaatgtggtctatccatacaatggaatatcattgagccttaaaaaggaaggaaattctatgatgtgctacaatgtctgtgaaccttgaagacactctgcgaagtgaaagaagccagtcatgaaaggacaaacagtgcataattgttacccttacgtgagctatgtagagtagtcacattcatagagacggaaagtagaatggtgaggggcggtgaatagaggctggggggagggagcaatgaggaattggtgtttaatgggtacagagtttcagtttgggaacatgtaaaagttctagaggtggatggttacggtggttgagcaacattgtgaatcagtgtcagtgaactatacacttaacaagggttaaaatgttaaattctttgttgtgtatattttaccacaattttaaaaagcttatttctcaattgtttatgcgagtatatgtgtggaatagttggggagacaaattcaaggagaccagtccttgtccatggcggtcctaggtaccacgggatcactgcgggggaactgtgaggtcaggagaggccttgaaaaaaaacgcaggtttgagctgagtcagatggaatgggtctgttttctatatcaagagacagtattgcagataatttttttctttcaaggaaagcaagtcaggagtcaaactctcatgccacygtagtcacaaatgaaatttattgctaatcagccatgtgacgtgtaattgctttttcattttcttatttttccagaagagagatttgtttagatgtttgattccctcactgattatgattatactggaagtttttcatttgttttgacagctcaattttttttttattgtaaatggactscctcattacagaggggggagcccttgaaagaaagggattgacctctgcaggcaagaatctgagcatcctaaaagtagaaaagggctagaggcttcgccttacaggccaggaagcttggagggacgcgctgctagagaccatggcacgcatgctgtgtgtcgaaggccaggtccgcctgtctgcctctccagcagatactctctggggctatttttttctgcttggttgtcatcytttggtttaaccaggcgccagggctcaggcctggacctgctggattccaaagaagacttcgaggtggccgagcttgtctggcttccagaggagctttctctgtcccgcccgggggagtggctcaccttggtctgagaccaatgggaggaagcctgctgcgrgcaactggtctgtgcctggaagttggacttgcattttctctggacctccaaagcaaacccgaatgaccactctcatcctccccttttgcttgtttgtgtatgtgcttgttttgcctggtcgtcaggcaggaggtggtgtcagatgatgagaggtgttgctcgtccctgggttggttctcttacggggctgtatggatgtcttagctcagactgctgtgacaggttactatagactgagggctaaaaccacagacttatgtttctcacagttctggaggctggaagtctgagatcaaggtgccgaccaaatttggtttctgttaagggtccatttcttggcttgcagatgacaaatgtcatgtgtcctcacagggtggagagagcaaggggctctggtctcttcctctttatgtaagggcattgttgccattatgggggctctaccctcaggacctcatctaaacctgattacctccctaaggccccaccttcagataccactgaaggtatctgggggttggggcttcagtatatgaattggaggggacacagtcatgcagttcagaacagtggagcagtgtgccatagtgaagggatctccagaccaggattctctatggaagttcttggccaggtctgagagttggttacagatcattaaaatttacatggaatccagtacttgaaagtacatgtcttcaggatggcgctgagcacattcgcctctgtaaccaaatgcctgaaatgtgtagtgcaccttctgagcaccccagtgctttccttaaagtgaatgcagtttgagaggaactcaattattgagaaattttatatgaccccatttctctcattttaggacagataagttgcttattttaaactctgcaggagctacatagaggaagttatactccaggagagcttaaatttcactctctgaaaactctgttccatgtaagtacattcctcctctctcccctcctcagtgagcacgtacccatcagatgtgtggaattctattaaaagcagctcctcgtgaccctccagggttttgtaaagctgacaccagcatcagtgagttggaaggggctgccacagaagacagacttactgctgcagcccgcttcagagccctcagtagtactttttcctctcccagcaaatccaggaggctgggaaggtgattgttaattgtttatgagcattaactgtttaccagtcatacttactattttaaatctgaccctgccattatgttgttttgtttctgttcacagctgagctttaagctgggtagaatttcgtgatgagtcactcctatgactgtaaaatcagtatcgatcaagccttcctgttcatcctgtgagcagtttagagacagatgagacaggcttatggtttccactggctcggctccgtgcgtgtgcggattgggcttcctgagagcctggttagccccttttatctgctctctgaaacctgcgcaagggtktttagcatgcaccttgaaacctctgctgcctgaagacagtgtgcttaaatgaagggtatacaaacccatgtgaggttttctcttcccttttccatgaactccaccccaattacctgtttgaattttgcatgccagttattttcagggaactagtgacccttttcttgccaccctgggctttgaattgaaggccagtgtgccaccttttctttggctttgttagaacgttgccctcagggtcatatgtgctggctgctatgaattcttactgcttgatggacagagaaaggtgagggttagatatctggacagggcatgacagggcgggtcatcgagtaggaacattgggaccttttgcttccaggcttgagcagtgggtgagaaacactgtcttcccattagggcagtgggtgaaacactgacttccctccatcctctgggcagccttgtcaggtgggtgtggaagctgaggtgtgtctgccccaggctgtgcagtcagccccgtgttctagcttcccgtgccgaacctggccctggaggctgtctgcctggcaagggggctgcacaaagctcggaggggcatttctggtgcttggtagatggtaggcctgcccccagtgcactgataagagcatgggctgagagtgccacttggattcggctacagtgggcggcagagtgggggtgactggtgttgcttttactctagagcagaggaggcagatgaggtagatcggggccccagggatgctgagctgagctgggtagagagaatttggttttgtaggatttggagacagagacaaatttggagtgtttggatgttcggggacctgcaggaggtatgtgaggtgtgtaaaatgcagcccctgttttawaaagagcttacattgtctcttgagaagataaggtgtgcccagctgtggaatggaaccagatgcttttatgagtgaggatggagtgagcacactgggaaagagccctggaattggaggaagagatcattttgcccagagggatcttggaggtctcctggaggagggtacttagatgatcagaaggattatactagacttgatggggtggtcttggcatcagaactttaaaaatgtattttggggctggaagcaaggctggagaggaaggtttgtttaagttgtagtgggggatgaggctgggggcaaatcagggatggttttccaggtctgtaaaggctggggtaagaggaatggttggttcttaagagcaaaaaaaatcccttacatattggttctcttatttgtgctaagttaaatacatgggaggctactggtgtttatgaaataaccctgagcctttttggggaggtagtagtggatgtctgatggaagagatagaagactggtcccaggggttcttagtggcaccttcctctcaggtcatcactgtgcttttgcacattgcagttatatttgactacatttgattatggcagatttacttagaagggcactggaaaaaagcctcccaaattacaactgacacaggaaatgactttattttcttctattttttttctttgcttttctcccccaatcaacatacatttttaaacctgtcatctcacatgacctgccggtagaattgatatgtttaatttctgtagaaaataactggaaatatttcacaagctccagtagcttcctgttgtagggacccttaggactttggaatgagaagttttctattgagttgtcatatttggaaggataaaggtgccctcttttccctcgatccacatagtagactcctgtgtgcgggcatttgtttggtgtctcacgttgatgcaaatgcagccattgcagagtgagccccgctctgttactggatctccatttgctcaaaagagagcagtgtccccctccaaatctgcatgtctgaaagcattcatgcaggttcattgcatgggtctttgcattttacttagacttagcaaaaatcaggtatagtctttcctgaaaacaaaagtgaccattgtttttaatcaactgcagggtgtttggagttgtgaaatatttagggtcccgagtccattccagattcaacattgggaaagaatgagaaagctgaagcctggggcaggctctgtctgcagaaaccatgggctatcaccccctctccttagcagcattgtaaacaaacgtcatttgtaaggagcatgtcccaactgagcttgtaattataggggcaagatttgtgtggtggtaggggcatggagctggagactgggggcttccttattggttcatttatcctggcccttctcttttctctcaagtctcagctcttttaagattcagaaaataatgcaaaatgcctaagatttctgaaattcctggcttcagagacttgactacataaaagagccaggattttcaggctggccatttcaggatcagccatttcccacttcctgattcatagcttccaggatttgtaatgcctgtagacttttttctctyttgcttaaaagtggccattgaaagaaaaaataaatagcaaaatccccatcccagaagttctacttcctgttgttgtactattgagctctgaaaaacagctttgtaagtttargctcttgtttggactatttcagtggaattcttgagatctttttgtttggacaggcaagtatgaaggcgataagtcgaaagaactacagcttactcagcacagaaatgcagaggctcaaatttaagttcttccttagctttatggtgtgtatattaatataatccaagcaatagtgagttgcttagccagggtgcacagacattttccacaatgccagttgtttccctcataatgtttaatgtttatttttaaaggacatatttgggcacacgtttcatttttgcctgtaaaagaattgggaatatttatgattcttgcaacaaaggagaaggatccaaagtaaccaagaaaatgatggactggcagccttcacattttcccacaactcttttcatgaaataaaatgtagataaggctgggtgccatggctcacgcctgtaatcccagcactttgggaggccgaggcgggcggatcacctgtggtcgggagtttgagaccagcctggcgagcacggcraaaccccgtctctacgaaaaatacaatacaaaaattagccgcgtgtggtggtgtgcgcctgtagtcccagctactygggaggctgaggtgggagaatcacttgaacctgggaggcagaggttgcagcgagacaagatggcgccattgcactccagcctgagtgacagagcaagactccatctcaaaaaaaaaaaaaaaaaaaaagtgtaggttagcaaaagtgcctacagttcaaatgcttccatgctaaacgttgtatttcttccggtctcatttgtgatgagagtcataagattttgagaaatacaaaaacctttccagctttataggatgataatggcttggccactcaagtagttctgattgggttaactaattttggtccagtaatcatttcatttggggtgaatggatttttcccccctaaatacgggtacctggaaagttgaagcagtgaatctggtgaaacttaatcagtgatttcgtaagggttaacaaatgtttctgggtgggattcctaatgtccagcttcctctgtgtagctcagtaagtcttctttggagacactagcctgcattgtaagactgtcacatgggagcatctttttattttattttacttttttttaaaaaaatgaggtctttattatcctggctggagtgcagtggtgtgatcatggctcactgtarccttgaactcctgggctcaagtgatcctcttgcctcaacctcccaagtagttgggctgatagacatgagctactgtgccacgtagcattcttggggattattgtagggtccttttggaccacacatggttttatactctgtagctgattgatgtactggcatgtcagtgacattgtgtgtatcattacactatttggttaattgatgtactggtggaatagccatcttctggaggctcttgtttgcatacttctcttagtggcggactagcggttgtacagtaaatagatgatcattctcgctctgttttacctttcctcagctgctcttctagtaggaaaataacagccctcttagctgtagtcttctggaggctctctcaataatagaagtggaaagaaaagactcaaatccctgggcagtgactttttagttgtttcatttgcttttaaggcagaaacacctttaactcttagtagccttacagatcatttttgaaaacacctgtgcttgccttgaatggggcggtgaccactggatccccccatgctgggtacatgttttgcagtcacagacactgctggcctcacctttggtggtgaaggaatgtttccaatttctgctgatggtgtagtgctcttgggagctgggtgctctgaatgagcagatgggcatctgcttttttaagcstgctgttcattctgcaaaatagttattgtgcaaatacctgataagcaccaggtctgtgccaggcgctgtattttgtattttgcatgtctgaggccagcatctttttccctgttcctttttctcctcatccagtgaactttccactgtggttgtagtttgtctgaaaaagatttggaaaaaatgtacagccatgtttctcttgtctagagaagctgtcttaaggacttcgacaagtttcattggcagagtgaatgagtggtggcctctgaatagttgaaatgttaatgctatctataggttctagagaatctgtgtctttaaaagtcatagcgataaagtctcagctttttgagagagtgggtttcagacatactactatacaggaaatctgattgttgcattgaaacaggatttgttatcacatcacggttagacatacccaaaaggcaaaaactacagtggtcatgatkgctttacataagattttggaggagaaactgttagctccatgaaagcaggaactgtgttcactcttgaatgcctgctacctgcacatggtgaatgttctataaatgtatattaaagaaatggaggtccttagagttccaagatcaccgtcaatatcatcaccctaggcttcctcgtccttccagttacttcttttccagaagagtccattgcctcctttatatgaggtctacagagcgcgttcagagggctcttatcattgattcagcaatcacgtgtacacatagcactagaatgacttcacatatttgacctgtttaaaaataacgtgcagctatgacgaacagcgaacctttgattagggacacatttgcctgccgccagacactacaagtattatgtgtattgcttttttcaaattataatagtaatagatgattatgagaagaaaattagaaaataagttttctgtctctctataaaaggaaaataaaaattatccttaatctcaaggtaaccattgttaatattttgttgtgttttcctgagattttccccctagacttatatgtgtatctatatatttaaaaaaatgaaattagtagtatactatgtacacacatattgtgaatttctgcccataacattatatctttatcacctggaatgaggtctttaatgaaattattaaaattaaaattattctataaatgctaaatttaggtattttacaatttttttttttttttttttttttttgagacaaagtcttgctctgttgcccaggctggagtggactgcagtggtgcaatctcagctcacttcaacctctgcctcccaggttaaagcaattattctgcctcagcctcccgagtatttgggactacaagtgcatgccaccatgcctggcaaatttttgtatttttagtagaaacggggtttcaccatgttggccaggctggtctcaaactcctgacctcaaatgatctgcccaccttggtctcccagagtgctgggattacaggtgtgagccactgtgcctggcccattttataattttgatcattaaaaaatgatgtgataaaattattgtgtattgttgttgatacactactctgattaattctttgggctagattcctaaaagtggaaagtaaggaataagaattgtgtaagtgtgcatgatcctagataaatattgccaaaatattttgcagaaaattcttagtttcagcttccagaagcagtgtctgtcatccatactccaccagaattgaacactaaattgagctttgcaattttagcatttaaaaagttgtatcatttaatatagaatrgcagtctcttcattatgatcttcccttgcctagtaagtttatactcaagtcaaaatcggttaatcatgcatattgattccttgtttatctttttcttttaattctttaatacttctagaatgtatttgtagttaagtgaagtaagatacctcctcctgttgacgatttagtttccccacattgtgctgttttttttcttcactggattatgtaacaatatcttttcttttttttctttctttctttttttttttttttttttgagagagtctcgctctgttgctcaggctggagtgcagaggtgtgatctctgttcaaagcagcctccccctccccagtccaagtgattctactgcctcagcctcttaagtagctgggattacaggcgtgcgccaccacgcctggctatttttttattgtatttttagtagagatggggtttccacatgttggcctggctggtgttgaactcccggcctcaggtgatccgcccacctcaccttcccaaagtgttgggattacagacgtgagccactgcgcccagcctagagactctattttattagtgttttttgtagacaaagtctcactctgttgcccaagctggagtgcagtggcgccatctcggctccctgcaacctccacctcccgggttcaagcaattctgcctcaacctctcgagtagctgggactacaggcatgtgccaccatgcccggctaatttttgtatttttagtagaaatggggtttcactatgttggccaggctggtcttgaaatcctgacyttgcgatccgcctgcctcgacctcccaaagtgctaggattacaggcgtgagccaccgctcctggccgagactctattttaaagctgtcttctcccactgatttgccttttgtttgtggtaaaatcattttgtcttaaacactgtagcttcattatacatgttaacatctgctaggaagaatctccactcaggttaaaaaaaaaaaaatttgaagcaccattatttcaggtgaactttgtgtgtgtgtatgttgttttgtttttgcaattcttctccgctactcttccaaaaaagaaaacacaaattyattaggttttgattgttaataaatcagtttgggagaaaacatttccagatatttgaattactcattcaaggacatttcgtgtttctccatttactcaactattatctatctatgaagaaatcacagaaggtcatagaggttgtatacttttccttttgggttatttctggttaatgaatgctttttgttgctaatgtagaaggaatctttattccccattgtttattttatatttttaaattttttttcaattaaaaaaaatttttttttcattcctgagacagggtctcgctccgttacccaggctggagtgcagtggtgcggtcatgactcactgcagccttcagctcctaggctcaagtaatcctccacctcagcctcctgagtagctgggactactggtatgcgccaccatgcctggctaagttttttctttttcttttagrggcaggatcttgytgtgttgcccaggctggtctcaaactcatgacctcaagtgatcctcccaccttcacctcccaaagtgctggcattgcaggygtgagccaccatgcctgaccttccttgtttcttttaggtgattattggttgtgtgtgaggaaagctctggtattttctgtacttatcttgtacctacccaatttgttgattgctcttattcgttataatagtctttcagttgactcttcctaatttttttgtgccgagaatcattgatgacaaataaggataatttggtctccatttttctggtacataatacgtctttacttaccatcagttgtgtgtcacttaggaatataaatggctgaaaataactgaaagcctgcctaataagggagtaggccgacaggggctgacttttctcaagttcaggcagtctggagggaaggagtctgtggctgctgtgaggtgctcaaagagggtgtgaggactgggctcctggcttctgtttgttcatccttagcctgtggcttttgtcctcgtgaacacaagatgacctccaggaattatgtctgtttcaggcaggaagaagttgagaaggaatgaagacaaaaggcaaaaaaggcagaatgacaggtcagcaagcgctgctcagccagtaggccctgcttctccttggccagaactgagttgcatgcagctggctagaaggtgggagatgaatgtgggtatggctagtgggttgggcatgggggttgggccaaccaagcatggttggtcatagggtcttgctgcattagcctgcacatccagaattgttacatgttgattacaggcatatttgtccttttttgtctatattaatgataatgcctctgtttctcaatgtgtaaggcatcttttggtttaagaggttttcatcatgttgaagaattgcctgtcttgttttcttgggtgatttattaaggatgggtgttgaatgtcatcagatgtcattttggcattcatttggattcagaagtggttgttacacctattaattgaggtaggaatagattacctagtagtaatccctcctcaaattcccgtgttaaactatttttggttgcggtgggtggctgtttaaattcctaattaaatttggtttgctaacatattcagattttttaatctcttattttaaatgagatagctttacagttctctttagatgagttcttttccagattttgctgtcaggcctagactagttttgtaaaatgaattaatgacttttcctttttaccttctctgtaacagtttttatagtgtggcaataaactgtcctttgaaggtttggaacaactcacttgttaaatgcctggaggctgacacttaaaaaaaaaaaaaagaatagtttttgttgtgtttctttttgttgttggtgttgtttttagtcttcagtgcagtggcataatcttggcccacttcagccttgacctcccaggctcaagcagtcctcccacctcagcctccctggtagccgggaccacaggtgytttgccgccacacccggctaattttttattttttttgtagtttttgtagagatggggttttgccacgttgcgcaggctggtctagcattactgggctcaagtggtccacctgccttcgcctcccaaggtggtgggattaacaggtgtgagccaccatgcctggcgtaaaaagatggttagtttttgttttgtgacagctttaaaaaaggtcttccatgggtgttggtctgttccagggttctggttctttcctctgatgctcttttttttttttttttgaaacaggatctcgctcttgtcccagatggtgtacagtggtgtggtcatggctcactgtagccccagcccactgggctccagcaagcctcccacctcagcctctggagtagctgggacccatacctggctaatttttaaatgttttttagagacagagtctcgctatgttcccatgctggttttgaactcctgggatcaagcgaccctcctcccttggcctcccaaagtgttgggattacaggcatgagccaccatgctggccttctggttctttttaaatcaattttagtaatttagtaatttccagcaagtcaattaaaaattatagctcrgttgtatgtagtattttctgtgtggtgttatgccctctgtatctgttttctcagatgttttagttgcttttctctcttaatcttgattagayctgccagagctgtgcttattttgtgtccccatccaaatccagaattaattgccgtgctccacatgttttggtcaatggtggacctcrtctgtaacagtagtcccatgagattataatggggctgaaaacagtgctgtcccctagggatatcgtgtctgttgtagtgcaaggcactgctcacgtgtttgtgttgatgctggtgtaagcccactgtgcttccagtcagatgaaagtgcagcgcatacaattgtgtgcggtacctaatacttgataataaacaaccatgttactggtgtatgtatttactatgctgtacttttaattgttagagtgtactccttatacttattaaacacaaaattaattgtaaaatagcctcaggcaggtccttcaggaggtatccagaagaaggcattgtgatcataggagctgatggctccgcctgggttactgcccctgtagacttccagtgggacaggatatggaggtggaagacagtgacatggatgatccggaccctttgtaggtctaggctaacgtgtgtgtttgtgtcttagcttttaacaaaaaagtttaaaaagttaaaaaaaaaagttaaaaatagaaaaaagcttatagaataagaatataaagaaaatatatacaagaaccaaaatttaagaaaaataaagtttgtaaaagtaaaaaaagttgtgcttaagctaagtttaatttattattgaagaaagaaatttttaaataaatttagtgaggcctaggtatacagtatttataaagtctacrgtagtgtacagtaatgtcctcagccttcacattcactcaccactcactgactcacccgagggagcaacttccagtcctgcaagctttattcgtggtggtactcccatatacgtatgtatacttttttttttttttgagacagagtctcgctctgtcgcccaggctggagtgcagtggtgcagtctcggctcactgcaacctccacctcccaagttcacgccattctcctgcctcagcctccyragtagctgggactacaggcgcctgccaccacgcctggctaattttttgtatttttagtggagacagcgttgcaccgtgttagccaggatggtctcaatctcctgacctcgtgatccacccacctcggcctcccaaagtgctgggattacaggcgtgagccaccgcgcctggccttttgtttcgtttttaagagacagggtctagctctgtcacccaagctggagtgcagtggcgtgattatagctcattgcagccttgaactcctgggctcaactgattstgttgtgtcaccctccccaagtagctagaactacaggctcatgccaccacacttggctaatttttgttttttaattttttgtagaaatggaatctcactatgttgcctaggctggtcttgaactcttggtgtcaagcaagtgcttggcctctgaagtgctgagattataggtgtgagcctggccatatgtactttttttttttttttttatccttcttactatatttttattgtaccttttctatgtttaggtatgtttaaatacacacatacttaccatggtgttacaactgcctgcagtattcagtgcagtaaygcactacaggtttgcaggttggtagcctaggagtaataggctatactgtatagcctaggtgtgtagtaggctataccattgaggtgtaagtatactctgatcacacaatgatgaaatcacctaactgtgcatttcttagaatgcatccctgtcattaagtgatacgtaactctgcttctttaagcctctgtagcactttggttatgttaggattctgtgtctttacaagtctgctttgctgatcgattgtgacatcttgagggcggctgcactactttctgcctgcaccttgtttcgcatgtctacctggcgcatgacatacacctcgttgttcagttcttgcttctctgcttgtgtctttgcattcaccaccagctattctgatagttatcaggaggttttcattgattgcagtctcgtgcaatgggtgcaggtaatgggtagccttatggaggagaaaatgcttacctatttgggttcattccaaggagtagttcaaggataaacctctaagtttggggagtgctgtaatttgctggatatgtgagccatagaagacagcttggatggcatctgatgcttcctggctgcagggatggaggcagcagaccctcctgcctggggtggttggttgccatccctgtcgggggctcatgctccaccctcaaggctattcttgggggagttgtgacatggctttcataaaaactcagtggaattttaccctgtgtattagttagtaaaggtgagtctggttcagttggtttgagtcaaaaaatctgttaatatctctgctttagacctgcatcaggctaatacttgaatttagggtctgtccctggtgtcatctgaatttttgtttgctatgtgtgaccaaggagatggtcactcttcaggatgggtgggtggaggggagaaatgctatgatttctgttgggtcatgtgaaatcaatttggaatgtggatggggcccttacactttttcttttgagcttagtgattttctgtgtagggtggagagcgattaggaaggaattcaccacccttaggtcctcaggcatagggtcttctaggggcaggactgatgagtgaacagcagggtggatggagcagaaccgttggaaccttcagggcaggacctgccaccattatttggtcacaggaagtgttcagtggtgaacttgttggaaatgattttgagtaacttccgtctcctaaatcatattaggactctttggtctcctatggttatctgagttgttttccaggaggagctgggaaggtaccaggagaaagatgactgtccctctcatgtttgctgagggtgttcctgtaaggtgagctagtgttccttttagggcccgtggagaccgaccttcacattgaagaagcatatctgtgctccgagatgttttcatggggagaagtgtcaggtgtaattataaaaggagtctttctctttaaatactgtaggcgatttagaaatagtggaggtttaattgaagagcttgtctacgtttttacattttccttaggcacagagaaactagtatctttctctgggttgcctttttttttggagacagaatcttactctgtcatccaggctggagtgcrgtggcctgatctcggctcactgcagcctctgccttccgagttccagcaattctcctgcctcagccttccaggtagctgggattacaggcacgtgccaccatgcctggctaatttttatatttttagtagagatggggtttcaccatgttggccaggctggtctggaactcctgattaggtgatccacccgcctctgcctcccaaagtgctaggattacaggcatgagccaccacacctggcctgggttgctttttaaattcatacctactgtcttatttgggtctcaaatgtgatcagtggttatacttttcttgstatgcatttaagttggagcaggctccggggcaccacttccctccctagagttgatgaacccctcatatcagtgacctccccatgtcacagtgtatctcgtgtgcactgctagatattctgatcacacagtgctgagattactggtttctctccctttctctttctgtggttatagggattctttaagggcaggcaacatgttctttgtttccataggatctgacaaagtgcatggcataggtaggtgttcatcaaaaggggtggaatagggttgatctcaagggttttaagagagatctgacgagtttgggtgtgtgacttaaaaagcagatacagcgccttttcacggatacacctccgtgattcctcaagtggtctggctgtgtttattttaggattctaaaagtaaagtgttctgttctgagtctttcacgatctgatgttctccagttctgtgaggtctcctcctttagtcccatcattggggctgtttctgctcggaaggccaggaagttgctggaagtctgctgggctttgcaaagggacttttgcttgtgtgggcattgcccagttgtgttacaacttgtttacagccgttggtttttaagggatgaggtaatcttagctcagcttagtgtaatacacaacagttttgtttattgagaaaatcattgttgaagtttttcagatgttagagatgttatgaattgcaatcaagtcggtatcctcttatataagtgcatctgacaagcccatttcacaactacatctcatcagtcacagttggatggcaaggtttattgtttaaagtttttgttttttcttttttaagttgggaaaggaagacagatggtttcagaagccaagaaagggcacaaaggcgtggatatttggaaatcgggacataattcaccattcttcttaattttttctgatctctaagacactgagacagctgttaattgaattgcttgttcacagtatttgagacgtaatgaaatgtgagtgtcctaatcacctggcgggcgtagatctttgggatcctcctggaggcttagtagggctgccctgagcagtattgtcttctccagctgggcctctgagctgtaccatgtgcccgtgctcagcctcagtccmtccctcagccagttgttaaatcactttggacgtgtgacagcctcaacatgtcacagctttaaaagttcagattttaaaaaggtaaggaaatgatctcctagtgagacaacttctgcctaaaaaataaaagcttctaagacataaattctrtgttatgaacaacttgcaattttcatagttttcagttttagctctggcagcctcwgatagatcttaaatatgtttatcacagctggaaaaatgttttattgtcatctttgtttatcataatatgccacctactctggttgtgtcttacaactgtagctctgtggggttttttttgtttgttttatgcttgctaatgggggaggtggggggtgkgggcggatgaatataaatgatacctagaaattgaaattggaaaaaaaaatgtattcagccagtactctttccaggttatagctaaacgtcagttggcaacctctatgctgtggtttattgagtaacacttaatacttarcacagccctcagtgaagatcttttatggccttttctgaatgttatacaaacataactaaagcttatccagatgaggacagggacctttctttccttcctttttaaatggagcaaaatttggccactgggttgctgtggatgagagagtagaaggagaaaggcagtcatcgggagactgtgtgctgagagagcgcatgtgggatttggcttcaggaagtctgggcttgcattctatccagcgctaatatttagtgagtgtgatttggggcaaattatttcgtctccctgagcttcagaatgtttgaaactttgtgaggagtctgaccccacactgtaggctccctccatgtatatatttcttcttccttttcctttttttttttttttttttttwaatttttgagatagtgtctcgctctgtaaccccagttggaatgcagtggcatggtcatggcttactgcagcctcaacgtcccaggctcaagggatcctcctgcctcagcctcctgagtagctggggtcacagakgtgtgccatcacgcctggctaatttttaacattttttgtagagatgggagtctcactatgttgcccaggctgcactcaaactcctggactcaagcagtcctctccctccagcctcccaaagttctgggattacaggcatgagccaccatgcccggctggaactgttggctttgaaraaraatgatgctgtgcttgcctttgcagtcctgtcaccatacttcctggaaagtgggtggacacgctggatggtagatgttgagttstttagatgcctggatgcttacatgctttgtgtgggttcttactggggctgtaacttactagaggacagactccaacttctgcttacttagtctggggaggttaataataatctagggcacccgcttcccagtgggtttccatcagtctcctccagcccactctactctctgttagccagctgggcacctcttcctctgtgtcccttcggtatcttcccagtggctctttccacgactggctcagaccatgtgtatatctgctcattgtctgtccagggtccctccaaagatgcctctgtgggctgggcccctggtggtgcttcctccagataattgttgaagatggaacaggagtgtgcaagaacaccagcgtgcttccagtattcaggtctagcggcaggtcccaggcatcagcggctcaccactccaccgcaggtagcctgattgcccagccttggagccgcagcctccttgggtggtgtggcagctgtcagtgtctgaaaccattttgaactttaaagggtggtgtcagacagcagctattgaggctacttaaaagaatttttttaaatgtacgagttcagtggcattaagtacattcatattgttgtgcaaccatcaccactgtccatctccagaacttgttcatcttcccaaactgaaactccatgtccatcaaacaactccccattgcctttttccccaagtctttggcaaccgccattccactttctgtctgtaaatttgactrtctggatacctcatgtaagtggactcgtacactatttgtccttttgtgactggcccattttatgagcataatgtcctcaaggttcattcaggctgtagcatgtgtccagaatctccttcctttttaaggcccaataatatttaataatatatgtatgtgtgataacacatttatataatgtccattaccatgtggtatatatgcttatccatttgtctgtcgatggacacttgagttgctccccygctttggctactgtgaataatatgactgtgatcatggatatgcaaatatttccttaagtctttcagttcttttgggtatatacccagaagtggaattgctggatcatatggcagttctatttttaattttttgaggaaccactgtactgttttccatgtagactgcataagaattccaatttttccacatcttgccaacgtttatttttatttatttytttaaattttttatagtagctatccattctaatggatgtgaggtggtatctcattatggttttgatgggacttttgagttttagcaaatatcaatgaagtatttaattttttttttttttcttagagacaggatctcacattgttgtccaggctagagtgcagtgatgtgagcatagttcactgcagcctcaacctcctaggctcatgtgatgctcccacctacgcttcctcaatagatgggactatgttcctgcgccatcactcctggkgaatttttaaatttttgtagagatgcggtcttggtacattttctaggctggtctggaagtcctggcctcaagcagttcttccacctgaacctcccaaagtgctgggattataggcgtgagccactgcrcctggcttatttaaatttttatgggtatgaattcacttaaaagctgaaggttttgagaggagagrgagcatrtgaaaaaacctaaaggttttgggaggaggaggagaaggaagagagggagcatgtgaacaagagcaactgatkacttccttgtcattcatttgcccagtgtttactaagcacctgctgtgtctcagacctgtgctggtttggcccttgtgaaggacagtaaatacagtgcagttccagctgcgcatgggatcacagtccagtaggtaaacgagtgcctaaacttaagagaaatgagtgcagttggggtcctgtggcggtgaaggggcgagtctgcacccaggcgagtgttaaaggcctggcctagagaagatgggtgttttgatggaaggagctgctgggaascatgtgtactcggtgtcttggagtttagaaacctcagttggctccatgtctcgtccttagtaaaggaatatcgggagctgagactggatgtattgacacaggtcaaatcacagagtcttaggccatttcaaggaggttggatttttctctggaaggcacagggaggttttgaaggacttaatgcagaagaatgggcactgtcaggtttgtggtttggaaagtccgccttggtagtagggtggagggtgcattatggagggctagaccagggtccagcccccagcgagatgctgtgtggtaaccaggggagagagaggtggtggtgttagaagccacgacttggcatagaagccaaagcatccccaggttgtcattgtgtaattaatggttaagttggggcaagaaataaagctcttaaaagtgtccagctgtagagctctctgcctgtttttatcttcagatttttgtctttgccatctctggcctccagtggaaggccgaagttacttaacttccttgctggaagcagggctcctcatgattgccagcccctgtttggtagtggtcctggagtgctgtggaaatgggatacttggtgccacttaccttggggctttgctcctgaactgcagcggtgtcttgtgctctgtggtttgtagcatggaacagaggctgatgggcggggagtttgagtcccagtgattgaggccccctgcctgcctgcaccttactgaaggaaggacatggtggcttctcagtgtgctctctggtgatctgaacctagattcttgtttcacgggtagggggcagggttttggattcagccctggccagccctggcccaagttcatagtgtcagtagtatagttctcccaccacccccttctctcctgctcctgttttctcccccgccccttctctcctactctccttcctctcccactctccctcctctctctgcctttcacttccccccacactctctctcccccgctcccaactttctttctctcttcgactcaccacacaacacacacctgtgtgtgtgtgtgtgtgtgtgtgtgtgtgtgtgtgtgatggcactgttatttcatgtgtatacctttgcgtagcgttggcacatgtgggaatgctattataatgctttcgttgggggtctgtgctaaccactgctgagtgtgcttcatgttttctagacagcatgagaccagagctctccaccttgccattagctggtgggagaattttgagaaagtcacccaattgctcttaagtcctcatttttttttttaaatctgtaaaatggtatcacagatgcttatagctcaagactagttgatgagggtctgtgactcaaaaggccccatagatggggttcagagggcctttggaaatggcgtgcaagctctttgtaagtgtattttttttggagaaagggcccagctttttatcagacatcctgagagattcaggacctaaaaaataaaccttgattaatcttggaagcctctttttacgcagtacgctttgattcatcagtatatgcatgtggatgggttctcagatggcctgatgtttctcctccttcctctgtgtggtgggcgacgactttggctgcccagatgttaacatcagtaagcagaagctcagtcagtgttagcaaaattaaatcactctgcaaaaatcaatgttagtgaaattaaatcacttgatcttaaaagcagcatgaaatagcagtttttcatcttcattgtgctgttttcccactctagatatcttgcagattttttttggttgcttggttggttggtttttggcgtccttttcaaggacaagcagctttggacagttgcactacttttttttttttttttttttttttgacagagtcttgctctgtcacccaggctggggtgcagtggcgtgatctcagctcactgcaacctctgcctcccaggttcaagcagttctcctgcctcagcctcccaagtagctgggattacaggtgtctgccaccacactyggctaatttttatatttttagtagggacaaagtttcatcatgttattcaaattcctgacctcaagccatctgcctgccttggcctcccaaagtgctgggattacaggcgtgagtcactgtgctcagccagttgcactacattttttttttagatgccattgttgaggatccaggggtttgtcatagattgattaatcagaaagtattaatctaaagtattagaatatattgattgcaggcagggaccttgcatagtttaaagatgactcagaaggcacattaggttcttgccacactttgctgccatcacagatggatgtgagttgcccccttatataggtctctcgggatgccccagtggagaacagcattgatgttgaacagatcctgtccgatggagagataccagcgtttcagccagcggtgtgagtgagggcaggggccacctctgagggtgcttgctccctcacactgtcctcacgctgccctcaagctgtgggcaaaggagagggatcctgtgccatcacagccctagaagcagaattccaaaatgtgggctcctttgggtgtggtttgggggtcaaggagatagagcaagtaaggaatgaactttgagggtttatgatcattttcatgatgataatgacctaaaaacatgcttggctgggcatggtggctcatgcctataattccagcactttgggagactaagacaggaggatttcttgagtccaggagttcaagaccagcctggacaacatagggacaccccatctctacaaaaaaattaaaaaattagccaagcatggtggtgtgcacctgtagtcccagctactcaggaggctgaggcaggaggatcccttgagcctaagaggtcaaggctgcagtgagccatgtctgtgccactgtactccaacttgggtgacagagcaagactatcccaaaacaaaaacaaaaacacatgcttatggtaggcaaktaaaacaggaggtaaggagtaaacatgccagkcccctcctcctctcctctgactcttccttcttcccccctgcttcccaagggtaagctttgcagatacttgctatgcaagcaaaaatgctattcttagccatcgtttaaacacagatttgcaatttgtggtttttcatttatataaattttggctctcttcctatagcagaatgatctttgtttttaaaatgattttaagtatacaattaatatgtgaatgtatgtttcttatggaaattagaacaatacacagttacagagtagaaggtgataggtgatatagctcaccctctcctcttcctgctaytctccccagtctgcttcactccccggaaggaactactggcccatcagcatgtctccttccaggcattttttccatgtggttatgtccacctgcataagaaactgggggcggcagggtggggcggtgttggcgggtcaggcagaagcaagccacagagcagtaagggtactttttaaaaaaacatttaaatagatccctgttgtcctgcggcttacatgctcatgcatactcactgtttctttaaataaactttttcttttagaatagttttagatttacagaaaagttgccgcgatagtctagagagatcccatgtacctcttaacagcttcgcctctgttaacattctgtgtcaccatggtaatttgccacagctaaggaaccagcattagtccatgactgtcagtgaactaaactcaagactttttttggattttaccagttttgcccaatgttcctttcctggtctaggatcctgtgcagaatagcgcatcacagcacattacatttagctgtctccttcacctcttctggtctgtgacagggtctcagactttccttgtccttggtgactttgacagtttcgagggacactggccaggttttgtgcacactgccccttaatttggagttgtctcatggktttttttgtttttttttttttttgagacagagtctcactcgtctcccaagctggagtgcaatggtgcaacctcgactcactgcaacttctgcctcccaggttcaagcaattctcctgcttcagcctcccgagtagctgggattacaggtgcctgccaccacacccaactaatttttgtatttttagtaaagatggggtttcaccaggttgggcaggctggtctcgaactcctgacctcgggtgattgcccacctcggcctcccaaagtgctaagattacaggtgtgagccaccctgcccggcccatggttttcttatggttagtctgggaccatgggtttttgggagcaagaccacagagctgaaatgccctcccttcagtgatttgtcagcatgacctatcaccattgttgttaaccttcaccacctggatgaggcagtgtatgcgtggggacatacatctrtttgccccactgacatgagggttggatctctagaagaggagtcactgttcagaggttataggcatttgtattttttggcagatgttgtccttcaaaatggctgtacacatatgctcctcccaaaagtaggagagtgcctgttgccccatgtcctcactcaagcttggtgttattagattggtaatttttttgtgtgtgaatctgttaagttaaaaatatttctttctttggccgggcacagagtggctcatgcctgtaatcccagcactttgggagtccsagscgggcagatcacttgagctcaggagttcaagatcagcctgggcaacatggtgaaaccccatctctaccaaaaatacaaaaaaattagctgggcatggtggtgcttgcttttggtcccagctacttgggaggctgatgtgggagtatcacttgagcccaggaagttgaggctacagtgagccgagatcgtgccactgccctctagcctgggtgacagtgtgagaccctggctccaaagaaaaaaagaagattgattgagatagggtcttgctctgttcaggctggaatgcagtggtgtcatcatcatagtttactgtagccttgaactcttgggctcaagcagtcctgctcctttggcctcccaaagtgctggggttacaggcatgagccactatgctcagccaagctaaaaatatcttagtgtgcatttctctaattgtcagaagtgtatttatttaccataccctggaaaccttatgtaagatgatggtgagtttggactttccagtaacatttggaaactgtttagtaccaagctctcattaacaatataaacaaaataggggtctacccttaaggaatcaaagccattatctaaaagctctttcccgcaacaactacctgagataatgtccttggtcatatgccccagcatttaaaaatggagttagtgagagtctgttgtttaccacctgatacattggtaagagctgcttgatggtatggggacatcagtagggaggatatagacgtagccacccccgccctasatagtaggggcctcagggtggggtaagcctgggtgggggaggtatgagtggtggaacagtgggagaccctggatccttagtctccagcgtgattgcattttgccaaggctttgtcccatgtccctttgtcccgtgttccatttgcccgtggtgttgcctagagagcatggagrggctggtggagcatgctctgtggttccctaacccagggctgtgtggggagagcttgcagcacccccctgaccccatatgaacgtccttgctatttcctgctgtgccatccagcaactataggatgctgtgctgtggctgggagacctgtttggtcttggaagctgggtcctggatgagcagaatgaggcaggcatagaggtgatgttggctacgggcaggggagcrtttgctttgccttggagtagtgccatttccatgtagaggggcaagatttaccaccctgttgtggggatttgagactttgggttttgttttcctttacaccttgagctttgttctacagcaggtccctgggaagactggtccacaaagctgctgaatggggctgctgtccwkcagccctgcctcctgctgcagaatgcagaggacgctgtagacttgcttggtgggtgcctggggttttctgcctccctggtgcactgggcacagcggcttgcctgccttttgggtcgtctccacctcccagggatgtttttgttccctgatcgaatgacytcctgttttgtttgttttttgagacggagttttgctytgtcacccaggctggagtgcaatggcatgatctcggctaactgcaacctctgcctcccgggttcaagtgattcttgtgcttcagccttctgagtagctgggacttcaggtgtatgccaccatgccacgctcatttttgtatttttagtagagatggggttttaccatgttggtcaggctggtctcgaactcctggcctcaagcagtgcgcctgcctcagcctcccaaagtgctgggattacaggcgtgagccaccgtgcctggcctgacctcctgtcttctgtttttgcccactgtcaagggtagacttcttcaaggctgtacttgtgctatcctaaagaggagtaatgggagacatttctgactttgtcagcatgctgcttggcagcacctgcctcgtttctggtgaccatttggaaatgtgtcctttatctggtagcaaggagcatttacattgatccctatgcacttaattggcatacttttattcctctggattttttttttaaagcataattgttcgtgtctacatgatgtaacatgctgctgacttttaagcaaattaacagagttcgtgctgaagcgcaagggtgcagggaaacaaaatgggagggttattaaaggggtgaggcggctcctcaaagatgtcactgcaccattcattcttgtgttcctggcccatggcaggctcattaatcctccacgacaatccattagcatgcctgtcaacccttcagagaagatgagccataggaaggcttagggatccccacttgaactgctgtgtggctctatgaacatccccaccttcctggagtgaggtggttgtggccacctgactttccccattttttttttttggacctcagcctccagcgctcctgggccagactcagggtgggggggatgcaggtgccagtgactgacacttggcccctcacacttcactgcctgatttgctttaaaggcaagggttgctcatgcttgtctgagctctccatctgtttgagaattatattgttctcaactggaacttgtaaaagagaaaaaaatgtacttctcaatttccatggaagaatatagattttctggtggggtggaaactttcttagcatgaagggatctttgtgtgatctgcgcatcagcactgaataaagaatgggtgcgccgaagtcggggaggccgactttcctgtggcttgctggggaaagtttgaactgtgtgtaagcagtgcgtggaaggaaagctaagtgtggagataacgaagggaatgggatttaatagaaacagggtgtgatgagtggcagttgcctgatgaagtggaaatcttgtgttccaaatttgtgagatccatttctgtcctctaaggaaaatgttgtatgtgcaggaggagttcatgtagttgggttagattgtgttttctgtctttattttttttcctgcctctatgggttgtgaacaaaaacaagaatttgatattctgcagtatagttaactcgtgcaaacagtgtatgcttttcagtgggatataaggtctgaaataataggattttccctagtaagtcagtttcattcctttacatgtgggttatgagatacaaagtgaagctctgtaaagctttttacgagctccctgtgttgccctcctttgacgggtcaaggcattggggttgacagaggtttctactctcagaggctttaaagaggtgcccactctggtgagatggctgtcagcatgcacgatgtgtgtgagagagcacctcttcaatcatatgcacctggctgtagcatccttgtcagccttaagagatacctccaaagcggaattttctacccctagaatcatgtgaggtcatctcaatttaagccccagctctgctccctaaattacctgagtgatcccaggtaggtcatttgctcattgttaaccatcagtttccttagctgcaaaacagagcagataacaccccaaaagagttctcatagtaaatcacatcaggcttacacaatctcagaaatgtgcagctccacaggaatcttcattacctctttaggcagtccagtcgggtttcaaatgaatcctactgtctgttcttatatggaaccacagtccctcaccctgtgttgatctaagttctctgtttctctcctccagcagggtcataaagagcctgaccagtccccctccctggagacctttgtgtgctgggtttctgcagccgttctccatgagaagggacttctggtccctgctctcacttggatgttcttccactgacttatctctcttaatgtgtggaggcagaaacccagttttcagggtctctcccctggccccttactaagtctcccttaggtacagtctaagactgcctgactttttcttctttttttttttttttttggcagccacaacatcacatcgtcacatacagaaattatatccaattaaatctcctaagtctttttcacacctcctacatttgtgcatttctttttttgcacccaagtgtccaaatagcatttatttcctctctattgcaattccaatctgttgatctttttagctcttgactctgtcatccagtgtatttgccattgctcctggaaacttgtcatctttgaattagataaacattttatctgtgccatcgttcaagtaattgataaaaatgttgaaatctacagtactcagaaagagacctgtggcctcccactagagaccttccttggtctgttcattaatcagcactttgtagggtaaattgaacatttactaagctattcagatgtagttcatatttcttcaccttgtcaacaaagagatcttagcaaggcattgtagaccaagtatgtgttcctggaatatacatattaagaaaaaatccttatgccaagaaaatgggcacatccccaaaacccaggttattgtagtttacggcttctgacccagggcttcactttgtagcagtgtttttcttctgtttttgcctttggctgataccactgctagagtgcagataagagaatgttactaccagggggcttgagtgtcgggctatgattggctgtcatctggagcagagtgggactgagctgctcaggagaaaggtcttcaggtgattttttttgggaagctaagagcactggttttagacatcctctcctggctgatgatgggattggccttcatggggctgctgtctggctgggctggtgggcagaggttcctgtgggtgtggatggagaaatcctaaatgccgagggtrcctggtcttagtagaaatcgtaggatgcctcagtgaagaagtcagggatgcggattgtcctccggatgcttggatgagcgtgcagtggaaaaagtactcctttgggggaagaggtgaatctggaggtgttagagcagaagagtaaatgcagaagttgtagcagatacaaaggctttggcaagagtgggagtgatcattgaagggaaggcaggggcttgctgggacaggctggagccgtgatggaccctcatagtaaccctgctgcattttacaaaggaagaactgtgttggggtacagatgtgccaaacactcaaagttagaaaatcaacgcagtcggttgtrgcttctgcccttgaaacatcagatagtgagaacctgccactgttcagtttgcagagtggttggttgcatacagtgttttagctcttgcccactcaatacagaggttgcatgcgggcgtccacctgctccgccacctctgcctgcttgtggctgtgtgcccagagcccatttccctggggagtcagtgcagcactcctgggggacccttctgtttgtgtcctgacgaatctgactgtgctggatgcagtcccacagccacacctggtatgggtggcatctttaaaggcctggcctgtgtgtgctgtatctgcagcagagctgtggccaaacctgctttccttccatctgggttccccttggttctcggtggtggacgggctgtgtggtctcccctcagctgtccacttgcacttgtgttaaaatgcggcagaactttccctctatacttaaattgtggtgaaatacrtatgacataaaacttaccatcttaacttttttttmttgagacaggwtctcattctgtcacccaggctggagtgyrgtggcgcgatctctgctcactgcaacctctgcctcctgggttcaggcgattctcatgcctcagccacccgagtagctggaattacacgygcccgccaccatgcctggctaacttttgtattgttagagatggggtttcgccatgttggccaggccggtcttgaattcctggcctcaagtgatccccctgcttcggcctcccgaagtgctgagattacaggcgtgagccgccgcgcctggccttccttttttttttttttttaagagatggagtcttgctctgtcgcccaggctggagtgccgtggtgcgatcttggctcactgcaacctctgcctcccaggttgaagtgattcttctgcctcagcctcccgagtacctgggattacaggcgccaggcaccatgcctggctaatttttgtatttttagtggagatggggtttcaccatgttggccaggctggtcttgaactcctgacctcgtgatccgcctgcctcggcctcccaaagtgctgggatcacaggtgtgagccaccacgcccaccggcctcccatcttaacattttaaagtgttcagtttaagtacctttacactgctgtccaatcaatctctagaacrcttttcatcttgaaaaacggaaactctgtacccattaataactcccattctctcctaccacagccacgggcagccactttctgctktctccgtgagtctgactactttgagtacctatgagcagaatccgcaggatttctccttttgtgactgccttatttcacttagcataatgtcctcaagctccatccaggttgttgcatgtgagaggatttccttcctgkgcatgaactagagtgatgcagggactgacctctggccatgtgatgggtggttggtgatggatccaagaggtagctggtctctgaatactagcccagtccttttccttgctaggaaagtccccagatcagatagaaagcctcagtatttcaagaagcttctgttttgacaccacatccatgaagaatcacactgcagggtaggggaacagatgagtgggatttctacactgttatcagctagacttagataactggctaattgaaaagagtacaggtcacttaaggaaactggagcattgtagggcaaggtaaagtgcttttgaaatgaggatgtgaactgtaactggaatgatgtaatgtgttctacaaaatgaagccagtgagaggacaggggacacagggccgacttttatttaggacatttgcctggttctgagaagaaagttgaaagtcaygagagagagggaaaggaaggcagaaggaacttggtttttgcaggtgcctgctcagcatgggccttgccccagcttggctgtacctcacagcaccatccactggctctacagtctgtccttcggaggtttagggtgctgtctcatgcacagtgggtgctaggtggtagtgaggacagggtgtgggactaggcaggtgctgcccctcggaaggcctcatggtgaggcaaagatctctggctccgagggactctatctcctggtgtcctgcttcatcgagaagccagccacccatgggaactgtggataattagaaaggcttagaggctcttctaagggtgttttttgaaatatggagacctagaatattgggctttgggatattttaagatgagaaaggcatttggagtaactgtcagagcagataaagttgtttttatgaagatccgggaaaacggttgttacaaatacagctctgcaccaattctgcgccagtctgtttggctacagatgctttcagtggaggggacactggggcttgtgttccctttagtctttgaattcccgttaaagtttccatgtcttaagtggcgtggcaggatagaaacatctcacccatcttagtaagttctttgctgtatgtagcactctggttttaacgttctgagccttcaggactgcccttgatgtgtgcatttattttgttgatatgcatgatgtgtgggtggctctgcggcagtaaaacagttcacattcaaattacactcggtttctaatttctgttctcagagtttcctctgtaatggaaatctcttacattcttatcattgccttcagttattgaatgtgttaggtggccaggattgctgtctgtgtgaaatgggaatgtatatatacaacgtaaacatgttctgattgacacgtgaagataaagggcttaacatgaattgtgtcggtttacacttacacagaaaattctactgtaataaactgaagtgtcagtagtgtttgttatcataacattgtctttttccctcttttctgatctctgatttttcaattaggaatgaggcctaaagaaacccatgctctctcttctctgagcgcaaggagggtgtgctgagaccttgaagggcacagcatgggaggatcatatactagggagagtctgtctccaccccatttttcttctgctttgctttgtttcgtagtttcttcgggcttcttgggggttttctgagagagagaatgtcaatttgagaagtaacaggtgcacaggctttacctgcaccacactgcagataaggtgggtagggagggtagtgacaggtggtgtggtgggttattcagttctttcctagggcagtgggtctcacagggtggtgcttaggccagcagcatcagcatcacctgggtgcatattagaaacaaattttggggcctcacctcttgcgttttaacagttccttcaagtggtcctgatgcatgttgaggactttgaacactcctcctacaagcaaagtgaagttgacctcccacacacttgtctcagtctgctttctagcatctgtcccattgcctttgttgttctccccgccacacgggctgcacccctgggattcccccagctgccaccaggcatcagctccagctgcctcccagggtgtgctcctgcctctgcttggagtaccctgcctcccactcttcctggcaagaccctgctcatctttcagggtcgtctctgctgagaagtcttcctgacctcctcggagatagggagttgtggggccttgtctttatgttcccagggttctgtctattgcgctattaaaactttttttttcatttaatttgccacttgctagagagatggttgttctgccttcgttgtgcaaaattcagtgatacactaatcctctcctaacctcttaaatcattttgactttcacagagtgatagtgtctagagagggtttttgttgtactaagttattggttccaaagaattcattttaagaggagtaaagaactaytatagtatgccgcttactgagacaaaaccgacttctcacataagcccaaaggttttgttatgttggattttaccattagagttaaagatgatgattggttcactaatgtgctttaccttcacagtgtgcctgtagacctgtagtaaaagaaggctaattatgtttcctgatgtcttttatttccaactataagctaagcctatctcattttttttttttttttttttttttttttgagatggagtctcgttctgtcacccaggctggagtgcagtggcgtgatctcagctcactgcaagctccgcctcccgggttcatgccattctcctgcctcagcctcccaagtagctgggactacaggtgcccgccaccacacccggctaattttgtttttgtatttttagtagagatggggtttcaccgtgttagccaggatggtcttgatcttctgacccgtgatcctaccgcctcggcctcccacagtgctggtattacaggcatgagccgccgcacccggccaacctatcccatatttttaaagaagagttgatcaagtagttacccattttaactaaatggataactataacattctttaatggaattgttgacagagggataatcagtgtttttgctaattcatgccaccctcctttgttgtatgttagtaatatttacattggggcaacaaaatagatcagtatttccattaatgtttacttaataacagctgctaaaaggtattactgtttgcagtaacacaaaagcacttacctgattcttatgccagcttctatagggtaggtagtgacagcccattttgcaggtgaggaagatggggtttagaggtgaggtgtgtctgcctgagagcaggagctggtaaatggcactctgggctcatgggagtcacgctgtttttttttttttttttttttcctaggacctcaaggttgtgtctaagacataatttacagttctcgtgtaggtcttccaaatacttagctacacagctttggggcgttttctcagccaaatrcttttctttagcccttctcatattaacatttagttcttagggatttattttcaaaatatatatagcttgtatatgccattcacctaagttgttaragcagacattctgcctcttgatctttagaaaatacctaagagtattttgttaacagtactcatttcagctgaaagactttattttaaaatttaatttaattttattattgttttttgagacagaatcttgctctgtgtctcccaggctggagtgcagtggtgtgatcttgacttgttgcaacgtctgccttgtgggttcaagtgattcttgggcctcagccacccaagtagctgggattacaggcgtgcaccaccacgcctggctaatttttgtatttttagtagagatggggtttcaractcttggcctcaagcgatctacctgccttgggctaccagagtgctgggactgcaggcatgaaccactgtgcctgacttttaaggctttctttaaaatggcatcttttggccaggtgtggtggtaatcccagcacttctggaggctgaggctggaggattgcttgagcccaggaattggagaccaacctgggcaacatagggaaaccctctctctgccaaaaaattaaaaaacaaaacaaaacctaggtgttatggtgtacccctgtggtcccagctgcttgggagctgaggtggaaggattgcttgagcccaggaggtcgaggctgcattgagccacgattgtgctgcagcactctagcctgggtgacagagtgagaccacgtctcaaaaaacaataaaaaataaataaaatgacatctttggagaagtgaattctacccaggtaccaagcccctgcctgcccctcccaactcccttccctgactcccagcacccccatctgttttggttctgctgttgccattctctggctttggggactttgctgaggccccactgtccccatcttccagctgtaccctttctctctgcttccctgcttgtcttattctttacagggctgcctgggatctcacattccaaaagtttttgggtttgtttttggatcatgccaatatcggttgctttgagaagggagaaagggtattttgcattttccttttaatcatcggtgagtagccacaaagggtgtgtctctccctcttgtgctgtgtttactgtttactccctcggtgcatgaattatttcatggcaccagtggagcatattttcttctctttcctgtttgtggcttgcgcctcctgaacgctgctatcattcatggtccagcttggttttctttttcactgtttctatcacaaaacctcctgaagaccagtggtgtcagtcataggctccaaaacagctggttcctaggccctgcctcgtgctctgtggtttgggcttgtcttttcttccagagtaagtgggtagcttcttcctactttttttctcttttcttctataaatgggaggaaaagtgtgaagtatggagactgctctttcatttgaaggaaattcacagttccagctctgtagtgtggcctctgttaactagtggtcaacactgactgtggaaggggggccagatggcaaagtgaagcagattctttcctcctgtctgcattttgattgcagtatgaagttcaacttgcttcagtctttgtcttcatgttgtttcactargtactgaattttgtgatctgttggaaataacaagtaaatagatgcctaacgctttatacaggttgagcctgtctaatccaaaaatccaaaatccagaatgcttcaaaagtttcagcttttggagcactgacatgacaccacaagtggaaaattccacacctgacctcatgtgacgggtcacttttcgaaactcaggcacacgacacacagttaatttagtgtccccaagggaaaaaaagaccctcccggcccccttcagctgtgatgtgtcttttccacacatgcccagattccctcagacacctccacaaagggtaataaaatggttcgttgtatacaaactttgtttcatgcacaagattattaaaaatatataaaatgactttttagagaagcgagaagagaaatgagaggtaggggagggagggaggagttgggggacagttgggggaatagttgaagctaaggtgtttaggcagagctctgaggaggtgacgtttgagtggagacccagatggctagagaatggggcagcctcctgaaggagcagaagcactgtgggcggcagggtatcacagaggaggagctcggtgtgttggaggttggtgagtcccgtggagtcttgtcagatggtgttgggacagggacggaccgtgaggaggctggatcatggggaatgtgttgctttaggccaagctggagttgatagtggctcagatcagagctaaagtartggagacacacagacattgaaagaatgatgaaattcactcattctgcgtgtgtcccatgtcatgtgtccgctgcacaccaagtactgttttaggcactggtgatataattgtgaaccaactggagctgcggtgagagagaccatgaaaagaagggccagagcggtgtcctgcagagggtggtgtaccttgggagggaagtgtgtagggttgttgaggaacagygtgctgcacagggaggaaagacrtggggcagcattgtgggaagagcaaccaagattctcataggcttgggagcrgaagccctgaggtctgttgctggactagatatgtgaggtktgagaggagagaagaatcaggaatgactctttgattcttaacgtgagcaactcagagaatgagagtgctgcagtttacaagcttggaaggtggattatgtggggggatgagtgagttgtttgacacctcaatggatatactcagatggatgtatacgttagagctcaaaagagtctgggccagtgacatgaatttgatcatatctagagtatgagtggcacaggaagccacttgtctggatgaggtgacagaggaaaaggttgaggatagcaaccaacatttagaggtaaggtagaaggcagagcagtgtggaatcagggaagccgagaggaggaggcaatgccaggtgactggaaggtcaagtgacacttcgacagtgtcactgagggctctgctaggagctattcggtgtcataatggggacagaagctcagtcggagtgggttaaaggtaaccaggaggtgagggtgctgagaggtgggactattgacaagccttgtgtcaagttttgctatgtaggggctgaaatctaatgtatgtgactgtgtataagtgacttgacttccccaaatctgtttcctcacctttaaaatgggtgtttgccaagtgctggtttctgctattcttttctctgtcttaggggtgtcattttctctttggtaaaacagaagaattagatgatatgaagtttcacattctaagttctcaagctttgcccactcctcagcccttgggtccctccacttcctcttctcttcgctatctctgctcagtttctgtctttgattgtaatgtaatgcccagtgggacttttcttctctccctcgtctgttcacttattccgtcctgcactgggccaccagattaatcctgcaaaaggcctcacatgggcttctctccygctcaggagccttgtgggggctttattcctctgagatgaaagttcttatccccacatgtgatcctttatgacttgggtgctatcaaattcatttcctcaactgctcccctcttcaccctgaccatcagatctgctggcacatgggcataccttgttctgcattgtctctggcctgtgggatatttaccgagctttaaatcctaggcaccctttgggagccggcctgtgtgcagagctccccttagcacggtggcacaaagcttggacaccacctcttgtctgtcctgcttaattccattcacatctagagtggactcgctgtgtgcacaccactgaccacctgcctcatgtgacagttgttcctcatgggtcttagctctttgccttcaccatgagcctcctcagagggcagggcactgcctgttggcatttctcgtggtatcatacatgttgggtgcttcccaaattaattacatcagtcagaaaacttcactctatctgagaagctttaatagtgtactkgggattattaaatcctaaaaaaggttatcacaaagagttttcttggtgtgtgtctgtgcttagaatttagaaaataagtcatccagtattgaggccattttatgaaaagcctttaaaatctgcaaatgcrttggcccagcacttccacttctagggatttatcctaagaaaatagtcttgggtatctgccaataatgttcactggagtgttgtttataatgtgcaaaacaggagctaacctaaatgtccaacaataagggattggttaaaaaaaaaaaacaaccctcatggtgtgtattaatactctggaactactgtccccttaaaatggtgatgtagaaggacatgtattgacctagtaaaatattaagtgaaggaagtgtgtttacaaatgtcatttttgtctgatttcacttaccktcatttatagagagtggataattggcatagatagtgttaacattgtttatcgtggaatgttgagatcgttgatgatttttactggtttttttttttttggttattacctctaaactctgtaggaagcatgctttcttgatcaataaaacttaaagttggagtttatgctgcttttattcataaaaaaatcacgtttttaatcttctgttaggttatcctttatgtctacattaatgcacgtgtggagagaacacagtctactcggcttatgtcaaatggtagtgggaagcatggaagcatgcgttttttagtccccactttacaagtcacagtgacggttctccagtgtagagtagattgattgccctgtgtccttcaggcagggtgcagtagtaagttattgatacttggctgctgagctgtcgttcaggccttggcaactgacgctctgcagaacggaccaggagtgtgcggtggtggagtccggctggcctgggttgcagatttaactttcgcctctgcctctgtgtgcctctgggctgtaagctttagtttgcacggttaacggggatggcctctcccatggtcggttggagtgtgttgcacagcgtctggtccagtgttggcactgtataaatgccagctaactggttagccacctaaactgtcagtctgcaacccacagctctgcagtgaacaattgaacctcatttctttaataataatacaggattcctgaaaaccaactgtattattgtttggaaaatagtttaaaaattatttcyttctaactgagacgtttaccctcttgtctcccttcagtctgcgggccaggcatcgacatccgcaacgactatcagcagctgaagcgcctggagaactgcacggtgatcgagggctacctccacatcctgctcatctccaaggccgaggactaccgcagctaccgcttccccaagctcackgtcattaccgagtacttgctgctgttccgagtggctggcctcgagagcctcggagacctcttccccaacctcacggtcatccgcggctggaaactcttctacaactacgccctggtcatcttcgagatgaccaatctcaaggatattgggctttacaacctgagraacattactcggggggccatcaggattgagaaaaatgctgacctctgttacctctccactgtggactggtccctgatcctggatgcggtgtccaataactacattgtggggaataagcccccaaaggaatgtggggacctgtgtccagggaccatggaggagaagccgatgtgtgagaagaccaccatcaacaatgagtacaactaccgctgctggaccacaaaccgctgccagaaaagtaagaatgatgctgactgytgctttctctctgcctctctctctcctctcctcctccttgacctcccttctcttctgagtgcacgagttccgctgggcagggtgcagtcgtgttgcatttaggacgtggcatgcctgctgtgcggaagtggttcccagtgggggtcttggttggctttcctttgcatctgggactcttggattgcgggactgtggcgtggctggaggccatcatggctgctgtcaagactgttcaaatcacatgttagaaataatccagcacactcctgggctagacacttgctgaccttcagctttgaattcctgatgagaaaggtgacctggtgtgcttggaagtccctgagccttggcagctgggggctgcttatgtgtcagctctttcatcctttgtgcgaagtgatattttttgttctgcaggacttccttagtttgaatggacttggaatatggttaaataaagggaaggtaaagcactaactcatatcctgtgaaagtggtccttaggtcctagtgatgatgttatgatactcaggtgtcctggttatgacagagcacctggcccaggtgggagacctctggacccatttctgcaagtcccaggttcaggctgtacttgcaggtagctgtgtagcagggtgcatttttaaacctctgggattctgttttcgttcttttatacctgtttactgaacagttgtgaaaatcttaagatttcacgagtgaaggaactttggaaagtatttactgttctgggggtcagatggtggtattttgaagcttcttgtatatttatctgcaatatgcttattttcccttgagaataactgagctcttgccttcatgtgatcagttccttaagaaccaggctgtttggtattaaaatgtgactctgagccttcaccttattgcattcagcaatagttatgtatattggctaggaagcttttcctcactggtttgaagtcagtgtgttagctataaatagctattatttaagtgttggcccagttaaagatgtaaggaacccatgttctctagttatgaagaaccaagaaaccccaaattgttagacttgcctaaaataaataaaaggcgagaccccacaggggtgaagtgtgtaaagtaaataaaggacagacctcccaggtagcccttcagttcccgttcaaccagtcctgaggcaggaaaaggatctgtgtaccctgatctgccacgcacttttctattctgcagaattggatcagtgcgtatgtgaacattgattagtgagggcaggggtcccactggctgcagccagtaccttgtagagctctgagaatgcagtcaggccactttaaggttggctggagttggagggagatcttatgctaaagtcacttgtgtggttgattaaaactgccctatcattaagttacccactggtttgagaaaacaacaaaatatattttttaaataaccttgacatttaaaaattttatctgaaaagtaaaaggtgttatcaagggaggcagcatggagtagaaaagagatgttgaatgtggtgatgagggccaggaatgaccttggatgggccagcccttctgggctgtagttgggcttttttaggatatttctagggcagtccagtacatcccttagtggtgatcatatatgggcatgaggatgttttgaaaactcataagctctttagagaagggaggtgccatatgaaacgtcattaagtggagagttgttcacgaactaggtaggtagttactttggtcttgccataggtttttggctgtttctgatgagctactgwttgaagacccctggggtaggggtgaggcctgcattctgggtccaagtctaagagtggcgactagaaatgagcaagttatttaaattgcctgggccttggtttcttcatatgtggaatggggtaaagcctgccttcctcatagggctgttggaagatgaaaaggaggaaggaaaagcaccgtgaaaatgttaacgatggttagaaggtgggctctgctggtgacagacagagccttgatatcacctgttggttggtcacctgcttccccaaggccacgccctgcagccttctccttgaccatcccagccctgctgatgttccttgtgatttcacaatggagtacttatataaaattggtaactgctttccgggaaattgacttcccttccccttgtcctgaaaactcaggcatgggcatatttcttggagattttctagttgaatcagaacttcctcttggtttgygtagattccatttagacctgcattgtccagtgtggtagccgcttattgagtaagccacgtggcttattgagtacttgaactgtggcttgtccgaattgggactgctttaggtgtaaaatatacactagatttccaagacatagtatagcaaaaactctgtacaccatttcattaataattactatgttgataacatgttgaaatataacattttggatatattagattaagtaaaatgtgttcttaaatttcacctgcctgtttcctttttattcttttttttttttttttgaggcggagtttckctctcatcacccaggctggagtgcagcggcgcgatctcrgctcactgcaacctccgtctcctgggttcaagcgattctcttgcctcagcctcccaagtagctggaattacaagcatgtgccaccatgcccgtctaatttttgtattttaactggagacggggtttcaccaccatgttggccaggctggtctcaaactcctgacctcagatgatccgcccgcctcagcctcccaaagtgttaggattacaggtgtgagccaccatgcyygactctttttaattcttaatgtggctacttgaaaatttaaaattacagatgtggcttgcattctgtgttggtaagctgctttagagcatttcttttaacaccaggagttcttcccctcatcatctttttggctgagtcgtcactgcagcgctcatagccccgcatgtacctctccagccagaacccttaggaatcatttggggagctccatgaagggcattgagtccaggcagaatggctaccttgagttcaacataagcattaagatggccattcgaaaacattaagcacagaagaatcccattcaggtaatcttctgttggctggctgtagaactacggagaacatctggagaaacaygtcaagggtgtgtgtgaaatcgttgagcctactcgattttgtcgtgctgttgcgyggttttcacttggcactgtcctttaaactccttctgtgccgtgactctgcagtgtctggcagcgtagtagactctactccctctatggacgtgatccctctgtgggttctctgcacacttctgtatttctcggttctttttggatttaggagtggattttatacatttttgagtcattcctaaagagcgattgacccttaaagaactgtgtacagtggtttcctttcagtaagaacatagttgtgtggcaccccctgacatgtggtgtggttgattcttcttccttgtcttccaacgccaccctcttatgagtctcttcctacccccacaggtgccgcttctctgtctcccttccctcagtctggcttttaacggtggtctcctgacatagtccattcaggctgctgtaacaaaatcccataccctgagtggcttacacacaacagaaatactgctcacagttctggaggctggaagtccaagttcaaggtgcttaccagattaactgtctggggagggcccacactctggttcacagaagcaccttttcactgtcttcacatgttggaaggggcgagggattttttttctggcgtcttttttataagggcactaatcccatttgtgagggctccaccctcatggcctaatcacctcccagagccatcatactggggattaggtttcaacataagaattttgaggggacataaacattcagatcatagcatggctggagttctgtcctgggctctcttttcactttccttgttctcatctcatccactggtaactgcattgcctcctgtctccacctaaacttccaagtatctccagcccagaacccttttgagtccaggacctgtcattcatatccatcccagaacccttttgaacccaggacttgtcattcatatcagaccaccacgagcatttcactacagcctctgatggtcttccctgtttcctcacttttgcctattttttttcttttctattccctcttaagtgggccacacttttgttcccctggttcttatgtcaggaatgtgggtgtcctttggacacttccttctccagttggataccaggccctttccctcccgaatggaatggaaatgctgcttcagctgtgttcctctgctcctcccccttacagcagtgacatagcctctctcctgctattgtgtcctgtggctccaccgagcactggggagcttttcagtatgcacttttttttttttggagaaagagtcttactctgtcacccaggctggagtgcagtggtgcgatcttggctcattgcaacctccgggctcccaggttcaagtgattctactgcctcagcckcctgagtagctgggattacaggcccgcaccaccacacccagctaatttttgtatttttagtagagacggggtttcaccatgttaaccaggctggtctcgaactcccgacctcaggcgatccaccggtcttggcctcccaatgtgctgggattacaggcatgagccactgcgcccggccatctagtgtgcactttggactgatgagctcccctacctgaaatcctgtagcaagtccctataggataggcatgtggtacagtgtgaagctcctgagtggtcaacagctaccccgtgacaacatgccacactccatgtgccactccctccygcctgcctgctgtgtccttggccccagtggtgctctcccgtgctgaccagccggcacggctcacctggccgaactctagccttgccttttcctctcaaggatgtaaaggctctgcagatttcgggaggcctgtctcccagcacctgatgggacactttttgccccactgtaaattctgggtgtatcctccactgtatgctgtcaccccaagggcaagcactgcatctgcttagtgaaggatttattgttcggaagatacattttccccttgagcagagagtrgcgtatcctggcagtcttcggtgagccagttgtaccaggattatgaaatgcagatgtttactgtgtcattgttgctgtcattgctactgaggagtactgaccagaatcatctgcaactcttagttggcagagaggaccactatggcgggtagctcttttctttcctgccattgtggggatgattccaggccaaagatgatggagaagtatggaaatcatctgaaaggttgaagcttggcacgtgaagccattcatgactttgtaaggcagttttgctgaaggccagttctgccctgggagggacggaggtgaatcctcctgagtacctgtggttttcttacttcctgctgaatttacctaagtgcctgttgtttgcttgctgtggaggctttctggtatttcatttcaggtgcagatgccttcactttcccacaaaaaaaaccccaacaaaacctaagaccttactgcaactaagtytccaagtactttttaaccyawtgggatgaacagcctgtggtctgctcagatcaccctgagtgcgtgtgagaaggcctgggctttgccaggaaatccaggaaggcagggccgggctgtgttggaagctggcttagctggtggggcagccttatttcaattaaaagggcattgactgggagcagcagtcctggagtttgttgcatttcctattgccctcaaaatgagaaaccaggaaaatagcagattggagccttcgagaaggcagtaaatggctgtttttattgacaaaaggaaaacattttactgccatctcactgatggcatctcactgacttaaaatgaaggcaggttgtagtaaaaaaaaaaaagtctacatttttccaccgccacgttcttatatccttgtttgtcagccactgctcacaagggcagtgttgtcttgcggagtagaggcgctctccttccctcgttttcctctataggttggtgtggctgacctgctagatcaaagtggaggacctgtttaagaatgtgtaaattgaaggctgggcgcagtggctaacacctgtaatcctagcatttggggaggctgaggcaggaggatcgcttgagtccaggagctcaagactggcctgggcaacatggtgagaccttgttcatataaaaaaatttaaataattagctggttgtggaggcacgtgcctatagtcccagcactttgggaggctgagatgggaggatccgcctgagcctggggagatggaggttacagtgagccgtggttgtgccactgcacttcagcctgggcgacataatgaaatcctgtctgagaaaaaaaaaaaaagattttgtaactaagttttatggctagctttgagaaaggaaaataataataaaaaaagaatgtgtaaatcacctgctggatggggggaagaggggcacattgtctttgtagtgagacttcactcatgtgatgtgcagtatttcatcttaacattttttttttaaacttaagctacttgtgaagagctgagatgtttctgttaagcactgtgtggtctgctgctggtcttctgcaggccactgttccccagactgctaagacgatcatgacacaggcttgcattttcaggtggactcttgggaggggcttgtggaccctggaggagaaggcagccaggagaggggcatctggctttgtgttgttggtaggaacttgtctcggttgccctggaaggcctctgctctggtcagctgctcccagtgtgggggtgatctttatttagaagggggtcacatgcccccaggcctcattgctatgccttttatagtcaggcgtggagctcacattctcttctgcctgattgccgacgcttgttgccgagatggtgaagcagtttgtgtgcaggttccctgggacctggcttagcccacctcatttcttggggcgtgtgccttgtgcctcaaagactttgcttttggctaattgtcattagtgatggtgtcaccatcctgggcctccttcagaagtttttaatagggatctcgtctaagagaccaaaaagctttcagaaccactgacttgtggtgatttttgcatgccaagtatttggaaaatatctggagccccttcagctctcaccagttaaacctatttgtacawttgttctggtttcttcctgtgcttgaaaagcctctttctttgttgcgttaatacctctgtcttgctttcctcatgtgtatgccagtgtgacattctcggcagagtggggatgacgtggagcgtgtgggcccgtggttaatcttgtcctgaattgccttgctcaacttgcgtgtatagggtggttcaaaagttaagtttggctggtggtgaagttggaagcatcacttagaaacacgcctcctttgggcatatggtgtgaatcagggactctggctataaaaggtggggtctctgagcaccatcctrgttggaatgttcccctgactyggaggtagcgagagacagccaaggtgtttgttccagggaggctggtgggtgggagatgggatttttctgtctgtggcacaggcagtattaagtagagcaggctgtttaaatcacattttaagtaaaaaccaaagtgcacagatgatctgcagaacttctgggggataagaagctgctttcctcgaagaagttcayctccaaaccagcgcccatggctcagcagccagcatggcagccccaggggtacatgggacttsggcatgtgaggctggtgagggacagggacagctgggtccagcagtgcctttcctagggacggttgccacgtcacctgtctgccctgtacttccatttcctttctttgaactcggggggcttgcatcggactacctgtgccgtttcctcaaactctaaaattgagtaagttaytgagggtttccgtggtctgctctgagaagatttcttgcttcctgatctgcctgtgtgttcgtgttgcttggtctctctctctgtctctctctctctcctctttgatcctagtacatacaggcaaggtatgcagcatttaaaatgttcataactcatcaaatggcacactgatcatcatgtataatttgggaatcagggtttaagaaatttagagatcatttatatggaagaaggaaccccaagtagaaacccaaaatctagaccattctgggttctaatctgtacctgccactggctaacatatggctttaagctggatgttacaatgagagctggagtttcgtctgattgcacatagccttgcttttctgtctttggaaaagtagctcactgyagagccctggtaaacgtttgaactgcattgcgggagtaggcagaagaacagaacagtccttggagcttggtaggaggtgtgagggcttatgggggacagttgtcttttcaagtcaaggaggaataagggcttctggggcsggtggaaagggtgagtcttaggcagggaagggtgaccatccaggttagatcacttcttctgcggggtcagcttggccgctgttaggttttcaggatgtcatggggctggccaggcctcacccctgatatccctgagcatctgttccttacaatattgtggagtccgtgggggcagaagctaccatcctgtgcctgccctcactctcagtgtgactggtcttcaggatgtttaggtggctccacatgcggatgtacagctttcccctgcttgttttccccatggcatattaacagcgagatctgcaagaatacatcattttgtacagaacaggatgtatttcttttaaactacgttcctgtgtggacaagtggtatcatatgcaaaggtttaaggaccgttgatgccttgagatagtgccatctgtttgcctcaggtatgtggtgctaggacaaagctgccagacctcaccttccttcagtgagacaggaataggacagtatttgaaaagcatctaacatgtttccaagcacataggtttttggtaaatggtggcagctgctgctattttttttttaaattaaactatctaagagttgcattctragaccatctaaaattctgagtcttaagctgtgttgactatatatgttcactaccataactaaatggtccttctgtattgcttttctaaattgtagaatttcaattattgtaaatagcgggccatactgtaggtgtggttcttgctaatttgattcgtactgttcaaattcttgtgtctgtccagataaactgtatctttacagaacattcagcgaggtacatatgtctatatcggggtgccagtggagtcaccctagtcatatgtaaactctatttatttggttccgaaactgaatttattttgtttgcaagtttggtrtttgggagcatttaagaaatatccatagattcttgtatgatactgacattaaatcattaaataccatattttttaaatgcctctgtctgtttgcatggataacattaaagtggttagagtgggcacagttattggtaaagattacaaagatgtgcatttttatgacaactttaggtctcacataggtagccaaccatctgctccaggatgaagcatgtgcctgtttatcctcttctttggtaacgctaggtatatgtgtgcacacgtgcacgtgtgcgtgtgtgtttgtgtatgtgcgtaccactttattctcccacccagcctcttctcctgttttgtttagtttcattttcctcctctcacccccattgcaggaaacaaacactggctctctgtcctcccttaggtcttccttccgttcaaggggatcaggtgggtgggaaaatgttgtgcaggaatgccaggcctctgcccgaagccgggcttctgtttcatctcattattgaacagaagtcgctttttgtttctttgccttggtcacaaacaagcgcccagtcctctcttctttcttcctgccatttttcccagaatccatgtgggatgggaacagaggcagcgtatttagggactgtcggttgcttgatacccatggccttgtttagagaagctgcacccactgccccaacgtgtagctgcatctgatttgtttttgcaagtcctaatgaagggacctggatgaagttagtgaggttgccgttcctggggttaatgcagagtggcccatggagcttagccacccttcatgcagaaggtggggctgagggcagccagtgtgactgaggctcgctggcccaccctgagctgcttgtgcccatggggcccctggggaggagggcccagctgcagtgcgsatacatctgcccttggcagcagatctgtgaacccaggctgccattctggatttccggatagatgcaaagtgcttggacgtgttttagcagctgctgagaccaggagttgggcttagtagtaaaaagggggaacaaaataaaagaagatcaggagacaaagagcctacagtacaaaaaaggaaagacgaaggttgatattattagaartacttcctgggcagccttactgtttgaattaggatcacccccacccccacctcccagaggtattagttgtaatgcagagacaaatggaaactagtcagatccttgggtcctagaaaagaccagctttgttcctggggtggtaacctagtacaacgtttccgttcctatttcttgacctctgaatggccccttctgctttgctaagtagatgatattattaggtgcttagactattcttcagataggatgtaaggatatatttttgttctcttcctcagtgaacttgaaatgattggattattttgtaatacgtcgatactacttttagaagcttttgaataactgtgtcaaagaagctttagaagaggttttaagcaggrttgcagagaatgtactgagtgtgtttttccactcacaaggaaagacagcagctgaatgcagaagtgtgtrtctggttctaactctttatcacttcagggactgtccaggcagcaccatccgttggrtctcctgcccttcctcytcccacccctgccttayccctggccattcttttgtgaccagtagtcstttatgaatggaattctgagaatgtataattttctcagaagaatgcttctttagctcaccaaatatttcttgtttgctgaggggggaaaaagatcctccttggaaaagtcactgggtgccaaaggtgggtgatkaggagagatgaacttctgggtgtgcctagcaaagctgtttctgttgataggcrattaayaaaacagccaaacttgacctaacagactgccattttgagaggaatttgttttgcaggattaattggcttcgaggtgtactggtggctgtgcagtgatgacggctgtcgtgcctcctgtgtcttctgctcattgtgatgcagggcaagtgcttaggcctcagacacaggctccctgaacttcgtgttcagtgctttagggtggggggacttgagacccttgacttgactcggtcccactggaaagcttctgttgcttatttgggtaaccccaactctatcttattgggcrgtagtgttatcctaattcttggaaatactcagtgtagaataaagagctgatgaaaatgtgtaagaagggagtaagtggtcattagagagaaatggtaattgggatgatgctctgaccccttcagcaaaaaataaaaggtgaatggtttattatgagctagttcagattctgtttttggaaaygagcttggttatacatagtgcatttgaaaagcgtgaagcatggactttcagatgccagctcctcagcctcctgtaactccagtcgcaaaatccctccagtgtatctaaataaatgcaaactcatcagtgccttaccattataaagctgggctggagaggcaggtggcctggagaatcaaatgacaagaagtatagggagcagcccagcttcatgatcgggggaatttgcatgaaaattgtgtacacttaagcaccattgtctattgcagaaagcacgatctggcctcttctactgactttccttccagctctgagattcagttttgaagacaaggttgttggggacctcggatagatctgttggccgtggctttcagtaaacactactagagactgaggacatgttctagacttggaatggtatgaagcagtcgaactttttaggatgggccctacccttagggactgcctacgaaactagatctagaagaggaggctgtggacattaggaggtggctgcaattggraagttccagagagcttactgagggataacggatgtaggacaggaggctggcaaagcacctcagtgatagggcagaaggaaataaagtggttagggaaggagttgagagcaggaaattcaggtaggattgatgttaagtcttagatctttgaagtgactttctctggtctggcttttgctgttaccaaagtgaattattcataagtgcatatgagaaatgctgatgtaactcgattatgtggaatgaatttaaattcatttaagtcattcttttccactaaagtaagctttccctcatccagaatctgagcagcccgatagccaagcaggagtttccttgtgccatggccagtgattgatgtcttcttctatgatgctgctgaaatgctggggactctgaagcgcagctggagtgatcaaagcaaaattaaaatactttctcagtggtttgggagttgggtgcgttctgctgtattttttggttttcggcatctgggtttggtgtgcatgcatggtgagctctagctggagcagacgttacctactgaggctacgctcttcgtggtttctccttaaccatcacccacttgatcttccatgaagccccccaaatcttccttactgaggactcttgcttccaggttgcttttgtgctcatccattgctgggttatttggtcagtgatgatggtttctctgtactttttatcagtaggttcagaggaccttgtttactcctcattcatctctctccccaaacagttgagaaaccacttgtgggttaggactcatgctttgtttataatgtttgattctccaacctcacagctaatgggaagcccgtggaggagatactctgtaaaaatccatctcccatgtgggcttgaccccacttagtgtctgagtggtttggtcctcatagttctcttgggggaggaggaagggaaggaggaggaggtggcgatggcagtggcagcagtggtggcatcttggaccagagtgagaaatcttggaccagagacaaaagaggtcttctctcagggtagtgcaccatgagagggagcacctgtttacattttgtatcctggacaccaatcttgccttgctctggtgctggccctgagaggtgcaggaattttataaagagatttacaaaacatttttggatgaccaaattggtccctggttctagctggaatgaataaacaaactaaataacagtagagtgtgagagtaagtgtgtgtgctagagaatgtgtgcacatgtatggcctaggtgagttcttcactttgctgacttgtgaattatttggggtcctatggtcctccccatcattcttattcatgtcagtccaccatcattaaggaagtggaagcgaacacattgtgtacatatcactcccatagagagggagactggggaagaggtttgagttataagtcgcacctaggttaggtctggatgtgtctttgcaggtttccttgctagttccttggccagagtttccatcgtgtccctcagctgcacaattaaggtgcccccgttttgtgcaagtctcatgctaggcastatgagatgacacaaactaggattctgttgtgagataagataaaaacacttgacatttaaaagagagagacaacttatgcggtgtgacgagacactctacgacttttgccagaagagaaatagaggcaacaagtgctaggagctcagaggagggtaagttccacatttggaactttggattaaaagaatatttgggtctggttgaaatcgaggcctttcatgagaaatgtccacacttgctcagtactgtttgccgaacactgtatacaaggccctcgactcgtgaatgagttgtaatgcaaaactttgccaggcatttggaatgtggagtatactattttgtaaagatgaggtctgaatggtggtttaggtcccaggccagtgtccctctgccccccacctccatatgtgccctcaagccggtttggcttagacattatttatctctgactactgtgtacagcttagttccatggggaggaaaaggcttgatgaaccctaccctggaaggctggtggctctgttttctgatggatgaggtaggagtggtggaaagctggtagtttctactttgtgcctgtttaaaaagccccctctgaggccttagcacttaacagatgttcaggattgggggaataaaggagctgcctttgcagaggtctgtgggcatgcagtgggtgagagagcaggcactgagtgccccgagtttcctgcctgtgtgggcaggaggattctcagtggaatcaggagcatctccgcctggtgctggaggaggtgtggagttgaaggtgggattcttcctcttgaaggacttgaatgagtttctgtgtggctgaacagaaactggttcaacacccatgtcatgatttttgtgaagcgaggacttggggtcccaagtctaggttttaggttccctgctgtaacccgtggccaccgagagagagttttatgataaaatgtcagcaaagtayctgacaacgtctcacgctagaatgagtttcgtacatgtttagttccctctctytttattccacgcycccccaccccaactttaaatcagaaacgtgagggtgctgattgaagctttttataacttttcttattgagaattgttctctggagttgtctccaagaacaaaggaattccagacgttctycttctctccttgtctcttctgtcctccagtcaaagaaaaactctgcatatgatctttggcctggagaaatattaaatctatgttaagtatgcagacaygaatgggcaratgaaggatttgtggcaaagaagatcygccgaaacaaataagtcatgtaaatgggcagagggmaatattaaattgattgcatctttcagctcctggtacttaatgcaaagataaagtagtgggaaaaggttgtcatttgaaataatggaaagatgagggagttttgaagctagctgggatttttctgcctgttaatagagtgacttggattacagactataaagataaagagtagggccgttgcatttagtatggatcatgatgctgattgctgtctgagcaacctctgtactaagggaggagaagctaacatccccgggcctggaagatactggatactagctcattaaactcttgtgagaagccttcattagcattatgggaagacttgctgtatctatattatgaaggcatttagattttttttwaaatgcatgttcttaacattttttgtttattaagtggggcagtagattaggactgaatggatttgattctctcatcctacatagtgtgcccagaagccagaaggtttcccagaatttgtattatggcagcgagggcaaatttaattagcagataggaaaagctttggagcagtttaggccaatccatttaattgtatcagcaattaatattttgagaaaatggaaataattaaatttacatttcttctaggactttattttgttatcctttaaggttattgtaaatgaggagacttttgaactcacagactaaagcaaactacaccagataatcattaactttttctattgtgtgccacccttcccaaccagattgttccatagtatcacttatgaaccaagaacctgtgagcttgcaaaacgcatttttaaggagtctcaacttttctgatttgtgttaaagtttaggtgtgggtcccagaaatgagtttcatggaggggagagsttgtctctctgggtgggtaatacaggggccactgggggctcactgtggctttctggcacagacakttatgaagcaggggtkactaaagtgggagagagcagccagttctccagcagccccagtgagagctctcatggatctgcctattgcactggggtaggagccatcaccgtcagcttttctctggcccacagtgccattttctgattaagctgagacctctgtaatagacacgttgtcattttttcttgtgtctaaaagtttgcttgactgcagtgggtctccagctcagagcaggtctggctagagaaaacaggaggtgatgactggagcactttgcccttatggaacgtgctctgatgtagaaagcaagaggattttccttgcagtcactgaaggtaccttgtgtacacagaaagaagacagagggagccccggatgcctcggtatccctcagagccrgatccttcagacctgtgcagtacctgtggatttggttagtcgatgatgcgctgccattaaaacaaaggcatcggccctggaatagagaagttcagtgagaacctctgtactccatgggcattttctaggaaataatttcacctgccctgtgtaattctctggaagaatcacagtgagttggaaggaaacttaagacttggaaaaggattgagaggttagcccagaccayaccagggctctgaaggcccagctggggttagaacctgggacaccctccagcccactgtctcctgttccctggccatttactgccccactcccctttctactctcaggggccctggatctaatgaggggattcgtgcagtttgctgcactaatacattgcaagtggtgccaacctaaaggtattctgatggtggaatcagagcagtagcatcttattaggtcagaatctgtatctcctcttccaagatttttacatgatttagtgttttctgaattggaaaaaaacaaaaacaaaaacacacaaaaaaaccatgtctaaatcctagcatttcatcccatgttgatgaaagggcatcttttttttcccctaatctgtggttagaactctcagaaacttttagaagatccctcctatgttttggaggtttgcagatttgaaccccagttcctcccacagtgcttctccaactcctggaatgaggtaaacctccaggcagcctgttgacccaacccatgcatgccggtctttgggactcctagatgtggaccctggagtgaatagggatcaggtgggaaatgagttcctttgatsaagatccttgtaccagtgaactgaccccactccccgtctggattcctgtggtgattaccctctgtattagtctgttttcatgctgctgataaagacgtacccaagactgtgaagaaaaagaggttttaattggacttacaattccacatggctggggaggcctcagaatcatggcaggaggcaaaaggtactkcttacatggtggcagcaagagaaaatgtggaagaagcaaaagtggaaaccctgataaacccatcagatctcgtcagacttattcactatcatgagaatagcacrggaaagaccagccctcatgattcaattacctcacctgggtcyttcccataacacatgaaaattctgggagacacaattcaagttgagatttgggcggggacacagccaaatcatatcaccctcttagcaaggactgtgttcgtgatcatgactggcattcactgaacaatgactaggtgccaggcacctcgccagtattctttaatctttgcacagtctgtagggtggatatggatattactgttccattttttgtggaagaggaaatggaggcaagagacctgattataacttgtgcaaggtgccatgcagctaagcagccagcccaaatccagacctgctttcctatgattttcctgcccattactctcccatcgtagctcacctaatacttcctagtgggctgctgctgaacacacacccagggatgacttagtggcttgtcttgctctgaagaaggctaggcaccatgttggatgagttcttgaagatgtcttgctctagtcaagaaacttttaaatctttggagtttttgtccacatctgcctagttcttagtaaacatgatgtgggttctattagcatggcgccctccctcccttcctaccacctttatatgagcggagaacatctatgactcttatgagaaaggaaagatgaaaatcagagtgacatagtatagttaaattgcagatgcttaattataaaacagcttgtttctgaattttaattccttgcttttctctgactttttaaattcccctccttaggcagaattcatttttacattgatgattttttttttttttttttttttttgagatagagtcttgctcttgtcaccccggctggagtgcaatggtgtgatcttggctcactgcaacttccgcctcccgggttcaggcaattctcctgcctcagcctcctgagtagctgggattacaggcatctgtcaccatgcccggctaattttttgtatttttagtagagatggggtttcaccatgttggccaggcaggtctcgaactcctgacctcaggtgatccacccaccttggcctcccaaagtgctgggattctaggtgtgagccgccacacctggcctgatgaattattttcatgtgtggaacaaaactttgatgctgatcagtgattaggtacctttgtttggttcatttttaactaaggagatttctttctttttaaaaccattctttaatcttgtaaaaatatcatttaatgggtggatgttttagctgtgatgaatgacaggttgtcgtaaaggaagaaaggtatgtggtttccagtaaacttttaattcttttgcaaaataaaaataacagtcgtacagagagtaaaatatatgaagagtcaggaagtgatttatcaaaatcagatcttggactgctggttttaccatgaattaggctcttggaaagtgattgggccagtgtaggtttacattttttttttcttgttttatttgtcaaagcaaacttgtggttgcctgcccgtagtttaattctgcctcctttgggcaaacaaccgacttttactgggagtctttctcagggagataaaggtgcaccctgaaactctgctctctgattcctcagcaaagtcagtcctgagtatggggcttgggtgtctctgcaaggccttgcaagtgagatgggctgtcacctgagctcaggtggggctgctcctgccttggacagcctccccagcttctcctgcattatacccaggggctggagggcagagagcaggtcttcttctgctggtcggggcagtcacaggctttcctctcggcctgcttgtcctccgggtgggtccagcacccgctgggattcctgtgggcttagtcactgtgtggcggcggcagaaggactggggaaaccgccggccggccctggtgcgctgtcaccccgaaggaatgcgggccaggccggggctgctgggcctggaaagttctccagtccctgttgcrgatctggcctgccgactcaaagtaaatctctcttcccctttatttcccatcaaataaaaaaggaacacgaggtagccactgtactcactgaagatgcattgttttttttttttttttttttttaagcgagcagcagcaagatttattgtgaagagtgaaagaacaaagcttycacagcatggaaagggacccaagcgggttgccctgaagatgcattttttaacttgctttttaactaagtatttttgctctgagctttcctggatctgtaaacacacccccagctattcaagatgggcttcttggtgaaaagtgatgtgtcctaggagaaatcacgcctgttgttgccgctggccatcacagatcccggtgcctgtctgtgaaaggctggccgggctgggtggggatgagaatggtcgggttgtctagactcagcctggactgtctttgactggaggggcctgagctcctcctccactgctcaagaccccggttaaggggacagcagagcagggatgagaagtggccctcttcacatcacctcccagcaagagggcctgacttagtgctcccaccattgccagccccagtttcagggtcccactcagttgtatttgaataggtctcatgacatgtgctttgcttgaagagcggctattagcagcagacgttcaagaggctgagctcaagcaggtgagcatgttctgagccattgtgaacccagtgaggtgcctatgctgatgcccagggccgcctgggcggggtcaggcccccatcgcttcttcatcctagctctgggagtgcattctgcactctcccgaggccagctggtggcctttggtgatcaccctctctgtaagtttttaagtggcttcctttcctctggtggagaagccagcacctttatcctatgacaagaaagctctttgtagtaggtggtagtagaatcagacagatctggcttaaaatcttggctgtgctacctcttggctctgcacattggtgaagagaatttaccttcctaaggcctctcagctacacgactgtggacactcagcttccttctaaggtcgttgtgagaggtaaagaaaaggggttagtccagggccagacatggcacaatgcctcaatgaaatattagctgatactatcrtaatttttaaattcccataggactcactgttaaaggattacaaggctgacacaaaaaatactgcattttgaatttgtgtctgatttatacatttccaaagagtggaattctcactacaacagctgttctttgaaaggttagatctttgttctgagataaattaagtggaaaaaggtgtagagcattatatgtactctgattcttcagggcttaatttaaaaagagcatgtwtgctggtgaatgctggttcaatcattaagaagtttttgagaaggaatcccagaaagtaataagcacttatttttcatggaaaggaaccggaagtgcttggtgacctccacaggtaatcttgtattatttttgcactgtttggarttttttaaccatgtgcttttatttcttctattcttttcaaaggtcagtaggtgttatctggacaatagggttctggtctgttttctgttttcttcattgtactgtgcattaagaaaaaccctaatgtgcttttttttttttttaagtgaacctttccacatctcattgtccttcagtgagagcaggctgtgtgtgtggtcttggtgaactgtcccgttccctggagacagtatctgggggcctccctgcccttcccagtaagagctgggccttcacaggaatagaggcctaggattcgccttcatcctcttgaagagccctaacagtaggtcctggctggggtctggcatagaatgcccttggcacgaygtgtgtgagtgtgtctttccttagtaaatggccttgaaaatgycatgtgcttctggcaggcctggataaggtttgccctgcataacccttggaaagcacagttctcacttgtaacaccctgtctgcaggtccatgatattgtaattaaaaagttatgggatcacaagggcctatttaaagggcatctggtctaaaggcacagttaaaagcagaatttgtgtcagtggctcccttaatttctcaaatatggttctgtttctaaattcatcccactggatgtctgtgttgagttttctgttgatgaaagaatgtttaaaaatgaggcagatccaaattctaatgtctgagtgtaccactgcttaattactttgggcaggtcacctcacctctcttggaaagaaaggtgatatactacatctgtgattttcaatttttttttttttaactagacccacagtaaaacatagatatacaccatgatcccaggacagaataagtatataactaaaataagtgttttgaaatcacttcttgtctgacacagcactcacgctttctattcatgtagtaccacgatactttcttctattctaatgctggtaagagatgccttaaactgattttgagaactaccaatgggtagcagctagcggcttaaaaaggatgttattaaggtccttttcaccctgattttgactctgttggctctcagctgagtgccccatacttagtgcacatagagttggcctctgaggtcagcctcctgttttcctgtgaaaatgaggatggaagagagtcacttgtttccctccttcatggctaccccctgaggactgggaagaatttaagaatttgagtatatgttcccaatagcatgatgtgtttcattgttcatctgtaagcatttttaaatattcgagatctgtatcttgggtaatttttatcaactttttatttgtaaaataatttcaagtcagttattaaagtaacaaaaataatggcaaacttgataccttcccgtatttttttttcatatttttccttgaatgcttacaraaatattaaagaatattatcacatcattgtagtcaccgatgaattattttctggtggcttatgattagaagagcttgactcggagtggaaacagataacatttgagtgctctttctgttaattcatccttgtcaataaccccattagctaacttccagcaaggctgtgttaggaatgtggaatcaattagatgaattttgaaaataacttggtctgttctaaaaggccctatgagatycaaactgttgtggcctggtgcctggtaactttgatggccattttgaaatgttaccgtagtgataattcttctggaatctcaagtcattaaaagtgatatggctaactctgggccctgtgctataaaaatagatgtcatgggatgtgtgaatcctttcttcagtgttatagttaatagcaactgaaggaacgttttggtcaaatcccgaatacttattaggggctcactgcttggctgcatttttctcctctgcgtaaatcatctatccatgtaattattaacccctaagaatgaatagcatttttaaaagggttccattttcccctcatatgactttggttcattctcctccttgtttctgtctctcagtgaactttccaaaagatgggttatgatgaaagrtgaatcgtcgttgataactgctcttacttatctgtgtatcgaaactgcaggtagtgctcttcagctctgtggctggatttagtgcctcttctagggaggggtgggtgttggcacaaagcgtatcccatttccctgaatgtcgtgtggacacgtgagaggacagtgcaccctttgggcttggtgctgcccccttcacgctactgaaccccagggtcataattaaaagctgtgttagctcttctctggttagaggcatacaggttggaggcttgtacatagmcgtgagccggttggtctaggccaggaagcaaaccattggaaaatgtggttagcagtgacagttgacagcatgtttgcctgcagtagtggtggttggtgctgcgtgttgactggagttgcttgcattgggagagcctgacttggccaagtgtgtagcttgagaccagttggattcctctcasagagacagtcttcacccccaagctctgggtgttgggcgtgcagcattcgtattcagcaaacatttgctgatttccgcctctgcaactactgagctcagctttggggatctgaagatgaatagacacagccacacttctggggaaatctccctgtggggaggctgacatggaaaccaaccaaatgggagtgtggtgcatatcttattagagctttgtgcaaagtgccacaggaagcaggagaaggggtagattggtgtggagggggcaggggaagacttgcctaggagcagggcctcgcaggatgcagaggagtttgccaagtaccagagattgtggggtaggtgaataaaggctgagtataaggataagtcaattcaggcagatgtcctctaagaatgaaggtgagaatgctggcggaaaccagttgtggccctgtctgccttccctaggagactggacctgactttacaggcagtgacggtgaagcagggcagtgccacgagcagatctgtgtttcctgaagggtctctggcagctgtctggggaaggagggaagctggcagagccgtgggtggaggcagatgccattgctatggagtgagcatggggaagggggtcggaggccttttggagatagatacagcaagacttggtgaaggatgaagttggggcaggtagaggaaaagcaatgagcttacggatgactggagactgactggagaagatgaccacccttgccattaactaggataggaaacaacaaagggtaggagtttgacaggggagaatgtttgtgctgttgagttgttgagtttaggtgcttgtggcacgagcaaggggagtgagctggtctaggaggtttttggaaacactgacctggctgcagagagggagatcctgggacacctgttttgggagttatcccagtggggaaggatcactgggaagggggccacccctttgggaggggtcagtgggacgactcccaagggaagaggttggttatagggagttaaaagaaaggagcacccctcacgcgagcccatttttcaaggatacatgtttgtcttttagattctataaggagtagctgctacacagaaagatgtctacgtgtgggtgaacacctggcgtatcccatgcagggaggcttcagcagaccttggtggcgatggaaccaccacagtgatccgaggattgggtctgaaggctcctccgagtctccaataaaaggggttgttttgaagggctcaggttcttcctgggcttttttgggacagtcttgctctgttgcccaggctggagtgcagtagaggcaatcatggcttattgcagcctcagcctcctgcctctgggctcaagtgatccttctgcctcagcctcctgcgtggttgggactataggtgcatacccccatgcctggctaatttttaatagagatggggtcttgggctcaagttatcctcccacctcagtctcccaaagcgctaggattacagacatgagccactgtacctggctgagaaggtttttttttttttcccccttccaaacccccatgtggtccagacgaggccagaggatctcaggggaattccctctccgaggagcctccactgctattgcatggcccccagcatagtcatttgagtgaagagccctccaaaatcattaagctgatttgtagaatcagtttgctgtctgactacctgatgaagatgagaagtggtagacctccccccactgtaaggtcttaacaagatctaggtggaacatgggactgtttgcaagctacttctgtttctgaaatcacatgcttgggatcccaaataatctactgaaagctgtcttcgggaggcaaagcccagggatttgttttgtttgcccctaatcatctcttccatcccctttctcaaaagtcttatatctagataatttagtacatttgatctactaacagccagggccataacaggagctgatattacataccccggaagtcctttgcaaacacactgtagtggcgattgattagtgttccgagccataggtaacattagcctgcctcgtaggaccctcagatgctgaccgtatctgctgcaattcttagatgtaaaagagcgcgcatcgtataaatcaaaactagatgattattttcatttgaaattgttgttgcactgtaatttctcagggttttgtattttccaacagtggtgtcacttaatgggaagatcgctcaggctttgtaactgggcataataccaggtattctcgtttaggcattctgctcagtagtattaacctgaagccataggacatgccaatgtttttttccgtgttttttaaaaaaattaaaatggttggctacaaatgcatccttttttacttcagagtaagtcggccttggttaagtcttaatatttctcatgcctatttttttttcttcaaatgaaaacatacggagagaaaayagcatgtttatgccttttggttgtacccagcactgcccagaatggcttacagagtttatacccatggaggtttcgtaaaggtgacattaacttcgcagtaaagtcactgaccccgaacctgtgtcacttcaggcttagccaaatgctaacagagcagctcaaagcttaagcagaggtatgtgcttgctaagtaagtgtgtgttttggactaattggtgactaccattctgaacattaactgccctttgtgttttaatgttgccaggaggccgattgtgtaacctttggaggcttccctgagtttggagaactgaattcatgtggtgacttcctatttataatgtctttgggggagctatgaaataacttttcttctaagtgtgatttttgcttttttaaaagtttttatgttgttgtcaattgggtatttcccttctatgccaagacgaattgtaggttcaggtttctatgcagcctgtatgtaaacactggccctaaagaaggactctatcactctactttcagtttcttgcattaaaacaagtatgggtagcggtatccttcttatttctgcttcctggtcctgtgtgagaccctgaaaggtcctaatggcagtgctgattagattgtggccagggttcacccacaagttccgaagctggggaaggtggaagtgctgttaactgacttgtcccatgtctggggttttgcagcctggggagaggtgaccacccctcgtttcagtccaggtagggttttatgtccctgtcaaaaatgtgttgtgtgaagtaccttgactttcatttcccagggaagaaagcccgtttcaattggctcaagcggaaaagagcactgtgggtccacttaatggaagagtctaagagtggcttcaggaagtccactgggggctccccgtgactctgcccacctgcatattgtcttcattctaaggatccakgtggtagcaaaagggttgttacaactttaaccctgcatccccaccttcaggttcagtacccaagggtgagcaatctgttccagtggcacagacctgtttcaagaggtctctagccgtgatagtgctaggccactgccctccaccagtgtgttccagagaaagatgctctgatgtgccagcccaggccatgaggttcccggcctcagtaaggaagaaggaggacaaggtggtcccttaggagaaaatgtggatattcaagaaagagggtcgcaaaatagcaaacacccactatggctgggcagtacagggttgcagaaatatattttgatgtgtgatcgcattggagctacttcaaagagcaaacacaccactttgatttatttctcttagtgatacagtatttagagagggagatactttttatcttcrtgggatacttacagtggtgctctagaagccatgtactgcttctggcttctccttcctttcctccaaggctcctcctgcctcctcccaaagctctgtgccctgaaagakccttgagccattgctcagatgtcaaaattgtattaagcagacacatcaaattaaaacttttgggatcactcaccaatatggtttcctgtacagtactgccctgaggggggattacaagtagttatgcatccatttcattgatgtatcatttttattaaaaagaaaaacaatccaaccaagagaggaagtgtagccagctgcctaaagagtggcgatgatgggagatgatattttgattacattaatccatatcctgttagttcactttgcttctgtcgctgctgctggtgaagttactaatgtgaactaattacatttgctctgaaaagccagaatttttaatgcatctcagcaagaaaggttaatattatcaatttaacagcatgaatgaaacattgtgtgtattgaacttgaactgtcctaaaagcttggataataaaaacccagtggcttcttttataactcactggataaacagttattggtgagacatggataaggctttcttctctttcagttttatggggggtggtaggcagtcagcattagatgctgtctgtttacagggtgatatcgtaacttcgtgaaattggaggccacatttaaaaaggcactccttccttttaaaagctttgcaagggggctgcatatattttcctaattagtgggaatattttcttttttcttttttyttttttttttttgagacagagtttcactttattgtccaggctggagtggagtggcatgatctcggcttactgcaacctctgcctcccgggttcaagcaattctcatgcctcggcctcctgattagctgggattacaggcatctgccacctcacctggctgattttttgtattttagtagagacgacgtttcaccatgttgcccaggctggtcttgaactcttaagctcaggcaatccgcctatctcgggctcccaaagtgctaggattacaggcgtgagccaccgagcctggctggtgggagtattttcaaagagaacaacaattcaccacaccccaacatggtaacagtctttttgttttagaagcatctgtgaattgccaagactcgtagaactaagatgtattcraagtcagtcgattttctggaaacgacccagtccctgaagatagtcttttggggagttgagtgttttgagagggacaccccctctacagggacttaaaatggaatggctttttgtgtgtgcacatggtacctgcagtgatttcttgtgtttaattacttcctgcactcatctgacttacacagtggtaaacaatgaggatgggaacaggcggcagctgctctgtgccatccaccgtcttgggaaccccagcgtggcattctctctggggcagcatgttgaagtgtttggctggtgacattttggtgaccagttggctcctcattgtctttcaatgtggagattaggaaccgagcgaggatttggaacccttgcgtttgttctgccaagaacatgacttgcctctggcctgagagcagtggagtaagctgataggagctagaaatactgttttgggtaggacttacccaaaagagtgggctgagtcacagaactcccaagtttgagccctgtcaaataaattctgaattgttctcaggtatgtttctcaattggaatttttttaaaaatttaatttaaaaaagacttcgaaaagttaccttgttctcatttttcttctccctctttgccccgtccccacaatatcttagggcgaagaaaagcaggtttgagaaaagctttttttcatcatgtatttgtaatagctggagcctgctgagatgatgaggtrgagtggagggagaaagagaccttgaggaggtgtggagggggaaggggtggaaagttctgtcgtcttctgtgcctctctctctctcttgctcagggtctccagtcagccctctgggtttgtgcccttcgtgctgcactgacaggtcaaagccgactcaggcctttgatgtctgctctaggagcaaaagtgattcctggtcccgcagccgttyccactgccttgtgtatgaaggtctgctgctctgaggtggatggtggctctaggcaggctgtttccgctgggtgcggttgttgctgcaggtttttctatatagcttggtcatgctcctgtatctagattaaaatcctatgacagatgggcctgcttatatctaaacttattcagagagtcttatgataggcaacaggttaccctttaccggggtaaaacatggtttattctacagtttggtcccgttgtaaggccaggagatagagtctcactagtttgccccggctgaactcaaactgctggactcaagggatccttccgactcagcctcccaattagctgggactgttggtgtcaggcacacaccaccttgcctagcttgaagatctttcttctaaatgagcgggctttaaagtgatcagtgggacctgggcaggttggctcttgcctataatccaagtgctttgagagaccgagacaggaacatcacttgagcccaggagttcgaggctaaagtgagctgtgagcacaccagtgcaccccagcctgggcaacagagtgagactctgccccaaagcaagataaaattatcccacaggattttagtcctgacttgtgtattactatgcagttgtgtctgtstgaggctcagattcccccccatttaggatttgtgtggctaaatctcagatctcattttcaggtgaatttctctattaaggttataaaagaccaaaataactggaaattcaactctgtacttgaatacttggtaatgcccagcattctcttgactatcccatttcacagtttgccggtcatttccccagtgtactcactggattcttcccgcagccatgaaaggtaggtataattaactccagtttacattcaggacaatagaatgttcgtcaaaatgcttttgcacatgttttctcaccctgagtggctacacttgtacagtcataccctccaaactctaagatgtatactcttacataccaaaacacaaagaaacaacaggaagtaagaacaaaactcaagaggtctgagtgacatcttgccttgcttcacaacttcagagtttgcattgctttaaaaacattggttataagtgagtgtggaaacagtgtgttcactatttttatgctgtggctgtgctgtgcaggagctgggcttttcgtgcattttagacagaattgaccttggttaatgcttgacttgggaactatgcagaaacatccaggaagtggtggtggctgatcctgaccgtcctcagttttgtgaagcaacagcctctgtgcctctttctctgcatgctctgttgacggtctagtcttgagagagaacctgctgctgtcccgtctgtcrtagccttcctagcaactcttaggcctgcrtgctgtgttttcatgatctcccccaaagcggcactttgatgttttttcagagtcaaagtatcactgtggatatttatcccaaacaaaattgcaaactgatcaaatgttatgtcttttgataccaaatcaaaaacgattcttggtggctgatcaggttgtctcctaaaaatttgccttttgaacctatactgcctttatgagatgattatgaaagtagaaaatagcctgtgaaaaatggtacctttgctaaaaagaaaaaaaaattttttttgaaactaagagtctctgttgtccaggctggagtgcagtggcactatcttggctcactgcaacctctgcctcccaggttcaagtctcccgagtagctggaactgcaggtgcacgccaccacatgtggctaattttcatatttttagtagagatggggtttcaccatgttgcccaggctgttctcgaattcctgagctcaagcagtctgcccaccttggcttccgaaggggctgggattacaggcctgagccaccgcgcctggcctgctgtaagaaaatattaaacttaggatgggaaatgtgatctgaacaggattcctgtgaaggtacccagtgtaggtcttagtctcctctccagtgtacatttatggaggggcaagatttcaccattctgtgaagaactctgcgtgttgacgactgctcacgcctagggaataaatttcagagcatgygtagatagtgccattttctacttaaaatactataatccattatttacttcggaaaataaaagcattaaggctgaaagttttgggttagtaatcttgatgttttaaaatgccttagcattccttcatttgttttgcttgccacgtggttttgctctgatttacacacctctgtgcatggctaatccactgtgccactcttggggctttattaactcttctctgccagtttttcccttagagaatatcatggccattctctaagatgataaatgggactaagagtaaatgcaggctgaaaaagcatttaacaggtcaaggatctgaagcttttaagaaggcaaaacaataaataagaaacccaaacagagtcttgaagcacacccatcgaaacccaagtttcagaatttgctgcagccttgctgccaaatcacagtaaaagctgaaaaggcttttgtggttagttacgtgtgatacaagaaatcgatgtgtctgagagaagtaggatttctctttttgagggggaaaaatacagcaaggggaaatgttttattaacaataaatatgcggcttaccatatctgtagggcacagatttggttagtagtattttgraggcaggataaaggaagatcctaaaatctctgtgctgtgtagcttccattcgagctgcacatgttaaaaacattctaggatccacacagtttaaacaaggtggctggcttaggaaatgcttctccccattccttggcatccccacaaccctattcycctactttctcttatgtatctggactggcttttaaaagatatttagtgaaatttaattttctagggaaactccactttgtcaaaagtgtagtattcctcaaggatagctttgctggtcggcaaatctcagttgagtgtatttgtggtttaaaaaaaattctttctgaatagaaatacaaagagtgataatgtttaacattttattttttaaaaagctttacgctgtgtaaattgtgggttgacttcatgtttctaaactttgtcttttagaatgactctcttgggtaaattattagcagacactctcgtgttgacatgtccattttcctttccattaagctgtctccattgcagttctgttgatatggctttatatagttttcctgagctkttttttttttttttttttttttttggtaacaagatacctatgcaagctgaaaaactcttggctttttagtttgtatcacttccagaaacttttagatgctacgtatagaagtggctttcttttagggttaggtaagatacttccttttttggaaatagttttgccatttggtctcgctgcctgatttgtgctttttcttcttcagcaggtagtrggaggctgtgtattgtattgccttttaccagacacccagaggggtcatgttggaaaatagcatcctcttagcaaaaacacaatcccttctctgagaataaattgccaagtctttccaggtcattgatggactctcaggtgctgcatttctgcacgtcggggaacaagggtgaagaacagagctagtccagcactgctccgtcctcccgcatttcttcttctgtagagtcttttgcaaactagagagtcttgcagagagttgttgggttttcccaggagatactgtatgcaaagaattgtcatgaagacataaaatcaagtcttggtgtaaaacttttaataaatttaaaggcatgtctctgtttttctcctcctcyatggggattttcatgtggttagtaataaaactgtaggcagttgtatgtctagatttctatgtaatttgtttgtgttcgtatatgcacacctgtatacatgtgcacatgtattcaagaaagacctgcagtatgcttgaaaggattgaggtgcctagtttgtggtagtagctgaacagagtgggaggtcaaagttaagtcattgtgaggcaagggaacttgacttagccctttaagaattggtctgtccctgctaagccaaggctattagtgttttcttccctagctgtgttctgaaatggttcacctgacattcagctgggttgggggagaacctctttaaacatcagatcttattccggaggagtgtatccagccttctcacagcatatcctgttaaatatctgttcaaggttagcctaggcctggagtatggacagcatgaagccagatctaaaacagatcagttcatggataaatgatgaatttaataaaatttgaaaataaaccccacataactagtgctgctattgatcattcatatagccagcaggagtggtgagaggcttggtctgcytgaggtgtggagatgcttgtggyggggggcaaggtggacgagggctggggctgctcctggagcatctttacgcgggtggaggagctctgacacagtggcagtgtttgtaacactttccaaagggattaaaataattctgtagagttaaccctaggctagtgtggcttgatctgaaacagtcccagccagaaggtaagaactcctgtgttatgttgttagcatacaatttgctgaagttcacattttaaattttatatttaaaaaccaaaaagtagtactgatcattttggactgtttcaaagtgatattgtttttacttgttacaaacattggcttgcctgcatctaattgcactcacaatgggccggatgtggtggcttacacctgtaatcctagcactttgggaggctgaggcgggtggatcacctgaggtcagaagtttgacaccaacatggtgaaaccccgtctctactaaaaatacaagaattagccaggcttggtggtgggtgcctgtaatcccagcttctcgggaggctgagacaggagaatcacttgaacctgggaggaggaggttgcagtgagccaagattgtgtcattgcactccagcgagtgcagtgtaaatcccttaaggaaacagtgtgttgtggtaatcrtgatatcatagtaaataggttttgttcgttatttttttcttttacttccttttctaccagtgactagtcctaatgtgttctaacttttgaaaataaagtacaaattagatggatttaaacatacgggaagtaagacggaaattcattacttttaaaaaacaatttgttgtggataagatttagaaatggaaacacaataaactgtgtttccatgacacaggtatactaccaagttcttacaatgtacctttgaggtaacgaattttcatgtcatttggagtagggctgggccagtgagtcactcatctccttgttcattcattacgtgaatacctagtaaatgcccactaggcaccctggagtcatttgtgtagagtggcatctctatacaactgttcgactaactgtcggagacaccctaatcaccccagccacaaacaaatagaacattgtatgtgtgctgaatcccacaaaggccagacatgatgscatgagaccaagaaggaaaagaaataatgtggaaagggtttggggtggaaaggtggggaacctggaggcgggccacatggggccccagaagccatgttgagggttttgtcttcaccaaaggatcagtgggagattagtgtagaacattaaacagaggtggggtatgtgtcatatttccattaaaaaattcatcctggccacagtgtaaagaatagattagggaggaagccaatcaggaagcaattggagtaggcaatgcaaaaggcaaagtgaacttggactagtggtggagataagttgactgcagagagagtaggaagtaaaattggccaggcctgtgttgggggtgggcttgtgagcaggatatcaaagataatgtccaggattctggcttggatgacaactatggcaatgcccattactgagctaggagatgctggaggaagatcaggtggggactgtgagcatgagtttgatttttgcagatactgggtttgagacacttctgagtcaagcaggcatttggaaatgtggactggtgccgagaaggaattcccagcagtgacttggtttaggtggtcctggaaagtagaaacacacaygagataattctggggatggagcttaaagggacgtcagcgttcaagggccaggtagaggatcatgagctgtaaagggacccaggtggytccagcacagcgaggaaagcatgcgagtgtgatggccaggcttccagggagagaggagggttttaaggagaacaacgtgctaaaagccactaagaagccaagcagagtgagaaatgaagacctccactgggtcttgcaagaggggaggcctttgaggacctcacctgagagctgatgaatgaagtgatggctggaagcagctctggagagggaggaatactgtggggaggggaggaactgaagaagtagagaagcatggctgtgcacaggggaggtgggatggcagccagggaggagcagaggtggaatgtggatcttgttttccccaacagagatagaggggggctaaaagtccatggaagggactctgctgagagggaagggtggatccatgagacagaaggggagagctccagtaaggacccagaggtctgaggacaggccaaagcacagatggagggattagctttggatggtaagaggaaggacagatggccccttaaacatgacggtaatgcaaactgctctgttttttttttttcttttggcgtttgtgatgaactttgtatatgctttccttgtttgatccttatcaaaccttatgagaagaaactaccattctcctcatttgatggatgaggaccctaagccctggagaggccaggaaacattcccagagtccctcaggaggaggactagtgctggkctcctttcctcctgttctgctgcctctgagaggagccaggattgaatcgtagccttgtcctctgacctggaggtctgggagtaactctcttatgacttttttagcctagtagaattgaacatgaacttcatgttttaagggatggttgcatttgtttgaatggtcacttctttttctatcagtattagctaatatagggagaaggaagtcatgcttctcaagtaaagcaacagtatctgtgtatccatttacttgattgagctttctactgaattacaggagttaaattatactttgttacactcttgrtattacaaaatgatggccatgcctttattataaaatgacaccagttattctttcctggaggatgtgccttgtgtcactagccgcactaagcacttccccactagtggccccatgtggttgtgtgtcatcgctgactacctgttacaggtgaggaagctgggtggtgcagagacagaaagccggtggcccagtcaggagctcctaagtggcagagccctgtctcctgggttccttctcctgtctttcttgcctctcacttgaaataagagaggacatcagaactggcctgaatggggccctggtagggcaggaacaggacacctctgtggttttgttatgatgtcctgaggataaaggagtgaaaaaaaaatctttgaggaattgaagatttctttatgaaagatggctgaaactcctgacagcttttcaaattcatctttggagaaacttccgttttctctttcctgttccgaggcttaaagctgccctgaaatctacacatttatcaacagtctcttgtcaagactccagggagacaagaactcttatacattgctgttgagagtgtaaaacggtacaacctttatggaaggcaaattggcgttataaatgcgtgttacctttgacccagaaattctacttctaggaatttatcttaccaatacacctgcccacatacaaattgcagcattgtttttgatagtaatacgttagaaataacccacgtgttcttcagtgggagactggttaatacactaagatatatgcacaaaatggaatgctctgctgctgagagaaaccacaagtatgccctgcacccctgtgaatagatctccagtatattaggtggagaaggcaaggcaggcttcttttttgtaaagttaaggagggtaaataagactgcatgtttgcatctgcttgtatttgtgcagactgacactagaagggaaaccaagtaactgaaaaacacgatgattcaccggggtaggtggggaaacatctaggtcgggacaggtatgggagtgacacacctcagtgtacatctttgtatcatttttaaaagtctgtgcttgcattatgtatcaaaacttagtgctatctcctcaggtgcagggttctctggaactctgtctaggttggtctcttggatggcattcttgsagacttgccggaaaaccaaacaaaaggtgtgagtgcatgcctcctggatagatgtctttttagtgtaacttagcacaccttgtacactgtcagggcgcctctcagatgagtcatcccggcagcccctgctccatgagtgtcttccccacagtcctgagtgcttctaaaatcatctacaccagtggaggcaaaactagatattttcttagtttgcagaaaggaatatttccagacaacatgaacttgttctcctttggtctccttttccttgtcattgttcaagtcacaaggtctgctgattaaatttccccttgggtttcaaaagaacttgcttgtttggttgttgtgttttgccttttaatttgagagttgaggcccccaggtgcatgtggtaaagaattcaaagggctaaatgggtgtgtgttgttcgttatttctttgaacctcttggcacttgaatggtgtcagtaatttcactaattatggttggcaaagaaactctgacacatggctttggagctgtgttgttcttacatcatatctcttgagttgaacctatgctctcttgatggatgaactcgtaattcaccaggtgcgtggatcgctgtgattaattgtttcaagctatcagttatttaactctctagtgccaaatgttcaggagaaaatgtaagtgcagtgtaatgtaaaatcaagccggcaactccagcaatttgctcttcaaactatagctctatcagttcccattcatttatacacttacactaytcaatttgtcgttgttgttgttgttgttgttktttttgagacagagtttcactcttgtcacccaggctggagtgcaatggcatggtctcggctcactgcaacctccacctcccgggttcaagtgattctcctgcctcagcctcctgagtacctggaattacaggcacccaccgccacacccagctaattttctgtatttttagtagagacagggtttcactatgttggcctggctggtctcgaactcctgacctggtgatccgcccgcctcggcctcccaaagtgctgggattacagccactgtgccctggcactactcaatttgtaataaatcagggtaagttatttttggtgccaagtcgattaattgaatataggttattttgcatcttagattccctctgacgactaaatcttataagcagaggtatgtgagcatgagaactgtgtcgggtggtcctgaagagattagtggattagaaggagatttggagatttttaaaaaagcctctggacagtgagttaaatggtgggttgacactctgtggtcgggactttttggagagtctrtaaagttctgctgtatttctcaagagctagagagagatgatactatgaccaaatttggtttgaatgtattataatgtactgagtatcactaatttgttgggaaatgactgttaaaaatacttactgacgcttaaaaatatcacctatagcattagtataagtagccaactgatttacatatatttcatgtgtgtgttgggagaggggtgtggattcgttaggccaaagatttcggtaatatatttggaagagataaatgaagataaagagataaattaccttttgaataattccaaaactaaaaatgcttcccttaatttttatttctgattttcttatttctatcagagaaatgtttctcatgtgacaaatataatgctttcatatttacttctgcatgcacaacttttaattaagtattaattgattaattttttagagacaggatcttgctgtgtcatccactttggagtgcagtggtgtagtcatagctcactgggacctcaaacacctgggttcaagggatcctcctttttcagcctcctgagtagctggaactacaggcataagccaccttgcccagcaaatttattattattattatttttgtagagatggaggtcttgctgtgttgcccaggctggtctcaaactcctggcctcaagtgatcctccttccccagcctcccaaagtgctgggattacaggcgtgagccaccacatgcagtccgtgtacactttcacaccttttaatttctttactcattaggtgcattctttagcaattatgtgtaaagtggaaatgagcgtgcaaatcgtcattttctattgacttgcactccagaattggaaaattggaaaactgtaggaaactggaaaattagaaaactgtaggatctaaaacaaatcgcttctatgacttataatattcacttgtagaactcactggcctttgtcagctttcagagtatgtgaacactttttgccatgtaagtagttagtccattggyaatggatatatgtaagttggtatcttcactgcaaacatttagttaattgcgtttattcttgagccattcttgctctacccttaggacttgattttcagtagctacagtggttattccagaagttgttagaattaagagccaggaggaggtactatgtaagctacatttagactccactggacactcacatattgcacgtggaatatcttaaaggggttgtgtgctgtggtcagggtgggaattatctcttttctttccatgagacctccactgtgcattatttaagggcctgtcaattgcccgttattcaagttttgttgttcttggaggacactattgcctatttctttccttgtttaaaaaatttcatttaggtaggcttagcatagttgcagtagaatttaataaatccttttttttttttacagaataaatctttttattacgtaaataccctttaatttgcctatttttaaaattcttgtttctgtgcttaccttgttgttagacagccaaggggatatgctgctctttttagtgccaaggtaaaaggtaaagctgtatcttaaatatttgtatttctctttggtcttggtgacccaaagtgatttgggtcattctgacatttaatcaagtttaaacaacatggctcttagaagtatgtttaccaggtaatctgagggctggttacctggtaacgcaattgagaaatttcatcaagactaattgattaatttattaagcacttattgtccagtttgcctttaattttcatttttctaagtttccattagctatcatggcctcacttgttatttmataatgaatggttacaaattgtttgtgtgtttttgtaattagaatgtaatagcaatcgtctaccagatgagctgacattgtaatgacatgaagtcagtaacaattatgccttacaggaaaattaattctgtaatcctatcatcccatattttgcctaagagattcgatttggctgctgctaggctgcttaggcaggtgacagcatggtgggacacttctcatttttctggttagactacttaaccataacrttcatggtgccacctgaaaaaataattttatcgttttagacttttaaaatatttttaggctttttttttttttggcttaaaaaaagaatctgttctacttgggtattttgttctccttatttcttagtgaacaaagatatttgctcgacttctatcccagaaggaccatcctttcttcttccttttccttacctctaagggatatgaagctgtgagagggaattgcatatagcaataccattttgattccagtgaaagttcttacctttctcttttgtcattctcaacctcttacctgaagagtccattccctcagtatatagagcatctggaagtctaaggtgcaggcaggactgaaagagctgagaaaggcctcacatcaggtgacactggggcacctggctgtgctcccttgttggggggtcccttggcctgggcagttttgcgcttctccctgtttccctgtgccctgagactttgtgggtcacaggcargggggctggcctccctgatcaagggcccttggcctaggagggcccctggatttatctagtccagcttctcgtcgtccaggtgcaaaactgatgctctgagatgtttagggatttgtccaagagcagagttggagccacagtccaaatcttctgagcctagtatggtattctgtcatccttggtttcattttgttctgttcataaaaattgcccaaaactgctgggcaaagtggctcatgcctgtaatcccagctcctcaggaggctgtggagggtggattgcttgaggccaggagttcaagcctagcctgggcaacattgggagaccctgtctcttaaagaaaataattgcctaaaactattcagggttaaaaatttgtctctaagcttaagaatttggaaaaactcagaaaagtagccacctataactccagcattctgagaacagttaagtgtattttcttctagttttttgtttgtttttgagacgggatcttactgtcacccaggttggagtgcaatggcgtgatcactactcactgcagcctctacctactcaggctcaggtgatcctcttcacctcagcctcccgagtagctgggactacaggtgtacaccaccatggccagctaatttttgtgttttttttgtagagacagggtttcatcatgttgcccaggctcatctcaaactcctggcctcaagtgatccacccacctcggcctcccaaagtcctgggattacaggcgtgagccatcatgcccggccttcttctagatgtttaaaacaaacacattttagtgyagttgagcctctgatcgttacatgtttatttcctagcatttaaaagcctttcagcgacatacactccttattagcttaattttttcttttaagagcygtgttcttgctctgtcacccaggctggggtgcagtggtaccatcgtaactcactgaagccttgagctcctggcttaagtgctcttcccaccttaaccttctgattaactaggattacaggtgtgcatcaccacgcccaggtaatttctaaaaaaaaaagttttttgtagaagtgatgcctcgccatgttgcccaggtgtctgtcttgaatgcctggcttcaagcgatcctctcccctcaactctcaaaaggctgtaaccctgattttaatggtagtgtaaagtgacatgggatgaaggaaccgtaacattcttaaagtttccccattgttgggcatttgcattggtcccagttttttataagtaaagaaggctgcagcaaactctgttgtactacttaatctttgtcctttatttcaaattatctccctacaatacgtcccttgaaataggatttctgtggaaaggtatcagtttaaagctcttgacccatatggccaagttgctttccaaacagcttacctgttgagactcggacctatgcttctaaagcctatgtgtgaaatgttcacattgtctttgggagaagcttcccacgaataagaaaaataagggaagaacaaataacataattgtttggatatatgctgtggtttgtgtggacgtctcccaccctttcccttccccagcccaagtcagtcttctgtataaacaacttacataatacagactcttcactgtttgtattatacatgtattttgtgagtctgtgtcagtatttgtttacacgggaattagggcatcaggctgtcttcctakggttcctctgtgcagacttgtaracagtatgggttctttgcgtgctgagttgaggtggccccaaacctttcagacagttgctcagatacctggcagttgctcatttacccttccagaccttcctgcctctatattagccaatgacaagcagatgctttccacaaaacattcgtgtgtgaactgttgacatttatgactgttttctgagcccacaccaggtcatttttctataaaatcagaactgtgagagctcagggcatgtggccatcctggataatgggtcctgctgtctggggagtcrttttcatcaaaattcacttttaaagaatagagtgtttattaacgaaaatatgtgagccttggctgggcactgtggctccygcctgtaatcccagcactttgggaggccgaggcgggtggatcacaaggccaggagatcgagaccatcctaacgcggtgaaaccccgtctctactaaaaatacaaaaaaaaagttagctgggcgtggtggcgggcacctgtaatcccagctactctggacgctgaggcaggagaatggcatgaacccgggaggcggagcttgcagtgagcggagattgtgccacttgcactccagcctgggcgacagagcgagactccgtctcaaagaaaaaaaaaaaagaaagtatgtgagccttatcccccaaatgtacctgacatgtgaataatatggctcaaactaatgatgtgtataatattaaattgactttgttattataagtgatacataattcaattttagttaaaatgcattatttcaatcaatatcaaatattgcagaaggaaaacctaaaatagtagccaaagttactcagatgagataaagaatatgtttagggctggaaaatcatactttttttttttttttttgagatggagtcttgctgtgttgcccaggctggagtgcagtgacatgatcttggctcactgcaacctccgcctccagggttcaagcgattctcctgcctcagcctcccaagtagctaggactacaggcacgtgccaccacacctaatttgtttgtgtatttagtagagacagggtttcaccatgttagccaggatggtcttgatctcctgacctcgtgatcacctgcctcggcctcccaaagtgctgggattacaggtgtgagccattacgtccagcctttttttttttttaaataaagagggtctcaggctggcgtgcagtggcacgatctcggctcactgcagccttgacctcctctgctcaagcaatcctcccgcctgagccccccaaatagctgggaccacaagtatgcaccaccatacctggcttttttttttttttttttttttttgtattttttgtagagacggggtmaytctatgttgcccaggcttgtctcgaactcctggcctcaagcgatccacctgccttggcttctcaaagtgctaggattacagatgtgagccactatgcctggccaataattatataaattttgatataaattcctgctcttcaaggagatgtgggttttttttcctcctgagagtatatttataaagttaattggattttatacaaaagaagcttttgactcatttcatttagcttttaatgttatcatctgggaggagatggtgaagaattctgttagccaaaccatggcgaattaatgtttcttacagatggttttattactttttatgatattatttggatcatgaaacaagtatcttggaaaatgtgagatacaaagatgtgagttgggaggtctctcttgtatgtgagttccttctataacagagaaaggatactttcagtttaagctgagatgctttttccttttcactcttgaaaagtctttgttgcaggaattttctgtgccctccctcctctgggacagatctgcttcttgatactgcagggctccagccttccttccagccagctcatttctcagggaagccttgttttcctttttcagaaaatttaaaygtatatttaacgcacaatttaactccctttcctgttgataatttttttcttcttcatattttgttattaataatagcttacagaatgggatcagtatcaggatcgggaggtaaccaggtctccaagttttccctttcgtttttcttttctgcttttaatgagccttaattaatccagggagctaggctgcagtatctgtggctctccctgatgttttctttctgcmtttctgtcttggaggggaacctgaggatttggaagtagagggctctactagtgcttcctttttgtccttttctcattgtccaaaagagtcttaagcgatctccaggaaatcccctgctcctgccaggaatctgcctgtgagtatttgagtgagttgctgctytttaagtaccagttgagaagctgaaggttggtgttgtggttgtgataaactcccaacatgaaaactgaggaccaccagcgttttcagctcacctttgactcacgctggcagctccaggaacactgaacaggagtccccactgaacctttgctgcgttccgaagcagcacagccatggttaggcactgccaggcagctcttggaaaccacagggagggaagttttggttccttctttctgtctttgtttttgagaggaatgagcttggaataaaagaacgctagtaatgactgatttgcaggttaggtgtaaacattaaatcctcataacaggctaatgagaggtgggagaaattatccccattttacagatgaaggaacagaggctcctagagactaaagaacttgctactcaatgaggtcaggattcacacctaggttgacctgaggatagctgctgcagtgctcacccttcctaccttcccaagaaacaatacgcagagaatttcttttctaaatattgtgtgcctagaaggtgctttgtgttatcgaaacagatatatatgtgtatatctggtctctttaaaattctctttaataaaaacaaaaagtgatgctagtgtaaaataaaagatatatatagaaaattgtgtgtcctcgttaatcttctttaggaaagatatatgcatatatgcagtatagttttgggtttttataaaaatgagatcatgctattagtatagtgaatagcctctatatagtctttcgtaacatttttactttttctcggtgtatggatatcaatttaggtcagttgctgcggagtttgaaacgagttaaaatttcagcagttcacaaaatggatgattcatagtttagtcgagccatcatctgttgatggacagtcatgtggtttcttgttttttctttctctgtgtttcactaatgaaacaggattacagtaaattgactcgtgtatgtgtatacatccatctttgctggtactatagaaaagtgtattgctggctgggcatggtggctcatgcctgtaatcccggcaatttgggaggctgaagtgggtggatcacctgaggtgaggagtttgagaccagcctgaccaacatggcaaaaccctgtctctactaaaaatacaaaaattagctgggcgtggtggcagtggaggctgaggcaggagaattgcttgaacccaggaggcggaggttgcagtgagcctacatcgtgccactgcactccagcctgaatgacagagcaaaactccattgcaaaaaaaaaaaaaaaaaaaaaaaaaaaaaaaaaaaggcattactgccttgttcctgatttaaataaaaaaatgtgttttaacaaggaatatgttaagttttggtaaatatagtttatcatatttaagttgtgtatactcattcatgttttaatttttatcggaagaggctgatgaattttatgaaatgcctttttggcatgatataattgtgagcttttgcttttatttggtggtgtaataaattacgttgattagatttcccaatattgaatcatctttgcattcctggaataagccctaatttgttatggtgtgatawtctttggatatgttgctatttgatttgctaatatttttttaaaaattgtgactgtagcctacaaagccctacagataggggtctttagtttttttccttgtttgcattctatcaggtattgatattaggattatgttttttaaataatttaagaagaatttcaccctttcccagcatctagaagcatttacataatataggaaataacctgtttttttttttttttaagttagagtaaaattaactggaaaacttcataggcatcccctgtagtcccatcccagaacattttaaaacaaattttttagtttttcagaatatattatagttgttctgttcagcttttaagccttttctctggattttgatattttctacttgctgggaaagaatttatctacaatttgagtttatcgcacagttatttgtaatattgttatcatttctctggtaatcataaccctttctcattactaacacatatttttgctctttttttgcttttttcccccttaatcaagtttgttagaagtttatatattttattgtcttcaaaaaactaggtatattaattttatatttatcctgcttttaatttcatctcagtatttaatttttattcactttttccattcctttaagtttattaagttgaatgcctgtctcatttgctttttagtcttcttaaaataatggcatttaaggctatacattttctttgaaaattgcttttgttacgtatttttggttttagacagttgatctcctttttgttgttttctagatggtttgtaattaaaatatttatttgatctttgattctgacattacttagaagtatgtctgtccttgaatttttcttttgcttaccttttgatattgtttatatgatttatgaatgcagctctgaggtatctgagrggatttattaacgtttacttgcrtccaagtacatgattaagttttaattgctttgtggacattaaaaaattatgcccttggtaaaatgcaaaggttttattttctgtatttagtaaatcaaacttactgattgcattatagtcagatcttccaaattcatgtatgttttcagttgtcaaattgacagttaatgatgcaccttttataatttttttttttgagacagagtttcactctgtcgcccaggctgtgtagtgcagtggcgtgatcttggctcactgcagcctctgtctcctggattcaagtggttctcctgcctcagcctcctgagtagctgggattataggcacatgccactgcacctggctaattttcatatttttagtagagatgaggtctcactatattggccaggctggtctcaaactcctgacctcaaatgatctgcctgccttggcctcccaaagtgctgggattacaggtgtgagccaccacaccgggccccttttataatttttaaacttttcatatttccaagagaaatgcttagtgtatttatctgccgttttgcttgatgcatcaatatgtgtaatttttttatttttcagggattacatatttatcacatgtaatatccctctctgtccagtttaatgcttaatggccttgagttcttggtttgattttactattgccagctttgctttctttttacttgactttgcttggtatactcttgttcaattgtttgtttttaaatagagctggacttttaaaacccattgagacatttttgttctctaatagggacgttctgccttgtctttctttactgtgataatgcatacattttgctttattgctttcatcttattcaatggttgccatttattttactttctgttattctcaattcccatgttaattgaacaagtcctttgctaatttgaaaagtgtgttattttcaaagctaccggtgcctaacaatttgaaaatctgtatttttctcctgaaataggtaccagcattaaattactaattcttccaccagggtttgcatttccgcaatttctgccgttcccatgactttctctgtctcctggatgtgttctctgtcttttcactcatggattctagtagattcttattccttgctcttgggcgctcgcatttcttcttcttaatcctccagaatctgatactctagagcaacagatcttttctgttcaatttaaaattttaaagtgtttttttttttttaattcctgaaagtttttatactccaattgtgtctccacatatgctcttagactcctcttcccgtctagttctcctttcttggttcrattagttctgtttcagctggtgccacctgttgcagctgagcttggtcaccctccctcaggctcctgcgtcgtcctcagtgggtcatggtttttctttgcttgccgatggctgccctcagccgtcacacaagtcatgggttagtgtcactcaaggaatggcagaccagcagatggtaggtgataagccaggaaacagatactgtgccgctgagttgctctgttcccagtctcttccgacaacataaggcttgggaacagttccaccttccatggaagccccccttccctctggtttcacctgggacagcaggatgagcagggtgcagggccttcttccctgtggatggactctcagttacaatgaccatggagaactgtacccgctctctgttttggagatttgggagatcctgagggcctcagaaggccctcactctcatcccatgcactacctgtaagctcattagattactgtccttgttactttagagaggggactgtgagggaggcaggaccaagtatgtttattcaggccactgtcttccccataaagactatatttgtgtacatttttctttgctgtattgtgagaaggaggtagaaaaaagatgtgcatgtctgcatttggaaacagttctgagagtggtgctgcatcagcggggctggattgccctcaactataagaaagtgggatacttatataaaggaagcataatacagcatgtttctcttacaggaaggactgtttcttagagtcctcatcctctgtctccatcactcagtatagcaaatcatacattccatcaatgttaatgacatcaattgtatgcctgtaagtatgtacacacgcacaggggcagggggcacttcttcactccacagctggaaaacttgggacaaaatgcctagccagcttggcccaaatttgagggtattgccatctgtatctcagtgcaggtgtttctgtctgatgttcacagtctgtttatccagagtgccccagaaaggacagtagtgttaggttaaacctgtgtatgtctgttcttggttttaataacagtcctgtctttggaattatttagtgtgttctctcatttctcaggaagtcaggatgttagtgccgaagcacttctctgacttggtccgacattgaagtaccttcccctgcattacagaagaacggccccccagggggtctgtttgatgaacacatgtattattgcagtgagatactctagaaatagcttcatgtccttgcaaaattgccagcacaagtaaggacctggaaattgttgctatgcatgtatgtcagaagatttcttaaccaattctgtactgaataaaataaaatttattttcaagttttgtagggacctggggcaatatgtcagatagagttgaatattttcaaggcatttttagttcatggggcacatagttggcttaagatatctatgtgtatcaggactgaaaggtaaagtgcccgaacctgctaatgaaagaggtgtctgtgtggccatctgaggttcagccacaatgtgtcttgcagaattattttattttgctagtttttaatttctcaaacagttcagctgcctgtcccgtggtaccgtgagacttctaattcaagatgaccagtatttgcagacagagccactgcctttgctgccacattttgcttggttattgtgtgagaacaccatttttctctttttaaatgaattgtgtttctctttttaaattgagcatcygactgggcgcggtggctcacgcctgtaatcccagcactttgggaggccacggtgagtggatcacctgaggtcaggaatttgagaccatcctggccaacatggtgaaactcctgtctctacttaaaaaaaaaaaaaatgsaaaaactagctgggcatggtggtgcacatctgtaatcccagccacttgggaggctgagggcaggagaatggcttgaacctggsatgcggaggtcatagtgagccaagactgtgtcattgcactccagcctgagcaacagagagagactgcctcaaaaaaaaaaaaatccgtttacatagtgataaataaagtaattactatagtggtggcattctgcctaagtcatcttgaaaactgaatgcaaaatctttttaatagctccataatggtctcttgaagtgttacagatttttataacratagctgtaatacaagtgcctttatttactgtgagacttgaacattttgaccatttacatgggtacttgtgtgtctccagctgagctgagtgcatgtcgctgcggcattgcaggcgtgtgtgcatgttggctcttgcaacggggcgtctgccaggggttgtctcgggcaggagaaggaggccagactggcaccacttgtagtgattggaatgtgtctagtccagctcttcagttccatgtaggaggttttaggatggagattgtgttttgggaactccaagtcactgtccaatttggagagtattatgtaagaaggcttatgttttctgattacccatccttcgatacagaccaaataataccacagtgataaaaatgggaaaggagctgtcgctcagctcttcttggccgtgttgtttgcttttcgatgtctaatttatgaaagcatttcaaagtgacatatatactgaacagcttcgtcttgccaaatgtaaaataaactggagatgagtttagcacagagctttgtagattgttgtcctcttggtagagtcggggcctaaacaccacctggcctctgtgccagtggacaggtgacctgcctgtcctactgctggtctctgcagctctctgtcttgggcaaccctggctctgagttccagagtgttctccagtaggagagtctgcaggggcactgtggagcacctgggtatgtgcacatctgttgttggctggcgttgtctctgatggcttggggtgtcacagagacatgacagtactgtcactgcatacctctcaagcttttgctgagtcctacatgagttgcaggggcagagagggagggagaaaacaatgcctagccacactgagaaaggggaaagtgctacagagtcctggaaggaagcgaggatggacatggacggggaagcattcataccaggcaggaaaagtgacttcatggaccagtcacagaggacagggccagggatcaaaccttccgtaatttgcctccacagtttgtctgagactggctacctggttgagtctgccagagccctgtgtgcaggtactaccactcactgtcacctccaggcaggaaaggccatgtgaatgcatgcatctttgcaggaacttgcccctttccactgaggtttgaggcagactccaaccacatttccatccagtggcttagtggtcttacccgtgagcttgaastgttgtccctgccaggacagtctttgcctctgtaartatctccatattcctccatcctttcaggtcccattcagtccctaggtcctccatgatggaatattggttgatgcacttattccacaaacatttgttggccacctttcaagtgccagwcaacccttctaggtatggaggggtacagtgatgagcaagccactgtttctggctgcagagggctcactgtttagtgggagaaacagacaaatcatacatcttaactacactgcccttgattgctctttacctgttatatcagtcgatcttgcctgcctagcatttgttccctgtttgggggcctgtatgatgttcgtttggatacctcagggtacattttcccatctttgtgatgatgtagctcacttggtctgaatgatatgtaatcctgcacatgtagagtgaccattatatttgcataaatagcattggaggaatatataagaaatgaataaaagttgttatatcatttgatttttcttttcttttcttttcttttttttttttttttgagatggagtctggctctgctgcccaggctggagtgcactggcacgcgcatagcccatcgcagcctcaaactcctgggctcaagtgatcgcctgcctcagacttcattttgatttgtgaacctcgtgattctattacttgttccacaaaaaattttaaatgaaaaartatttcaaaaatacatatattccggccaggcatagtagctcatgcctctaatcccatcactttgggaggccaaggcagacagatcacctgaggtcaggagtttcagaccagcctggccaacatggtgaaaccccgtctctactgaaaatacaaaagttagctgggcgtggtggcacgwgcctgtaatcccagttactcgggagrctgaggcaggagaattgcttgaacccgggaggtggaggttgcagtgaaccgagattgcatcattatgctccagcctgggcagtgagtgaaactctgtctccaaacaaaacaaaactaaaacaaaaacaaaaacaaaacaggctgggcacggtggctcatgtctgtaatcccagcactttaggaggccgaggcgggccgatcacaaggtcaagagatcaagaccatcctggccaacatggtgaaaccccatctctactaaaaatacaaaaattagctgggtgtggtggcaggtgcctgtagtcccagctactcaggaggctgacgcaggagaattgcttgaacctgggaggcggaagttgcagtgagctgaggtcgcaccactgcactccagcctggcgacagagctaggttccatctcaaaaaaaaaaaaaaaaaaattcctccacaacatatattccaatgtttagtttttctgttacagagatcacatgtactctaacttgtcaactaaatttaaaaggaaaagacaactttgagagaaaattaaaaccaatgcagtgtgtgtaaatgccattttgataagctcttatttcatgttgacatattctatggtgctcgtcttacataacctagttagggaaatgttttgttccagtctggctttgtttttcttcatgtgtttaggtccttccactttccttttgttaatttttggtgttgtacttcaggaaatgaattgagggttgcaaatgacctggagggccttagtttgtttgcttgtttgattttagcaacagtcaccgtggtacacctgacgtggctgggactcctgattttttttttttttctttttgagaacaaagaatgtgtccttgtcttggcatggactgggtagccttgttcacctccccacccatctctccttattggtgaggcattgtaaaccgtgttaacaggtagcatccacagaaccctggaaaggttgtgaagtccctttggaagcctaagggttttgatctcatccaggttgtaatcttaaattctggtacaaattcccttgttacaactgggttaagtggttttaacctcttttgtgccttcattttgaatgcttagactggaaagtcgttcagagactcctgaccgaataaagcctacttccaaatgagtgggttgtccaggtgtgcttgtagatgtcacatacttctaacaaggctctgcagctgcgatgtcaccttgcccagcgtgacctcmttagcatgtatgtggctttcagtggccatgtactttgcttctagagctttctttcccattctgggttcttaggagggggctgtgctttgtgtgtggccaggcagaagtccatgttttagcttttcaattctcttgaagaaaacaaatgttgttgataagaacacttgtcatggcatccgatttgttcttgtgagggctgtattagcaataaatagacatttagtttgcatatttaacacctcatcttctttcagcccacacgtcttcactacaggattagcttttcattacttagtagagcttttaattacctgaagctttcgtgtctttactgggatataacttttctccttattaaccagaaaaagtcacagaaaatcttgtaatttataatggaatggagtaatattcacaaacaggctttggcaggattttttttgttattgtgttttttgtttttgtttttttgttacactagttttatcacaagacaagaaagaggggaacttttagaaataaaaattatgtgctaaaataattaaccttcctgagtaacacacacagaatgttggtatagtgtttgcaccagaggaattacatatggaagaatgctgggatcttttaccaaataagggaaagtagagttcattacaaatagaggcttctagcacagaaaagaggacattttataagtactgtgaagcattttcagagataattaaataatagaaaatattaaaccaatttaaacaatttgtagtttttttctaataaccagtaagttcttcgtcttcgaataattcttttatactgttctatttccagctccactgagtgcccmtgtgttttcagagaaaacaggagtctgttttggacttcctctttggtatatatggtgggagatttgtttaaaaaatttttttatagaggtaaaattcatatgacataaaattgtccatttaaaggtgaacaactcagtgacatctagtatattcatactgttgtgcaattgccatctctatctagttccaaaatacatttgtcatgccgcaaggaaagcctgtaccccttaagcagttaatccccattcccctttccgctcagctcctggcaaccaccagtctgcattctgtttctatggattcacctattttgcatagtgcatataaatgcagttatataatatgtgaccttttgtgtctggcttctttcacttagcataatatttttaaggttcatccatgttgtaatgtatcagtacttcatccctttttatgggtgaataatagtccattgtatccagttgtatccagaagatttgcttttcattgcctaacttcagggcttcagacacctcaatctttgttctgagatggatgtaaacttaatgtatatctctctctctcacccaatgatcatgccaacaccttttttttttttttttttttttttgagacagtctcgctgtgttgcccaggctggggtgcagtcttggttcactgcaacctctgcctcccaggttcaagtgattcttgtgcctcagcctcccaagyagctggggccacaggtgtgagccaccacacctggctaatttttttttcttttctcttttttgkttttgtagagatggagtgttgccatgttggccaggctcgtctcgaactcctggcatcaagtgatctgcccgcttcagcctcccaaagtgctgggattacagacataagccaccttgcctggccatgccaacaataattatttagaagtatgttgagaatacatcccaataatagaagtgaaagctctttaaaaagaaaaatattcaaaacttaccagctgatcttatgtttcatttagaatggctgcattctttgcagtaccctagggttgtagaaattctcccccatgattgcacaacccactccttctcagccagtgtgcacctggagtcagctgtgtttggccttaaggtgtccatggkccagcagggagagggcagatgggtcagtgttgtcctgctagtgatgagtatcccatggtgggcatgctgatgccacgcaagggagagggtgtctggttctgtgcagtggcagtggtgcaacyccttaccaaggtaccgtggggacctgggttagggcaggaggaggaaggtgttctctacagactgcagggcttggaggcagcctgtcatggggaagggygtggatgaagggtgagccgggaccccaggcaggtacggagcagttcaaggccgtcaagtgtgcttcattcttcagtcattagggtgtctctgaaaggtttttcattgaatcagaattcccctaattcacgaattctaaagcttaagtaaattcagtaataataaactgtcaattatccaagcgatgaatataaatccataaggtttttcaaatccccagaaatccctttcrtctcccacctggttttgctgagcgcctgtctcttctgtctcttttctgattcccacctttcacttttcctccatttttcgcttaatggatttatactttaaagtaggtattctgaaaattccaattttatgaatggtgtgacggtgagaactttgattcattgaaagataaaaataatcattacattttatactgcaagggtcatccttaatattcttcgtatttttaatatagctgcatgatttgagtagttgagttggggattggataatgtatttattgattgattaactctctgggggtccatacatacccctctttatatccctgtggtccctttttagtccttttgtaaaaacttgataatgttaacctctgccaaagttgatgcggtagttgtgagtggtgggacgcaagcgtgttgatttattcttggagacagcagaaacagcaccaccttcaactgttttgtcatgatcatcttgtaaccataattctgtgctaagtcagaattaatgttattttgttaattcaggttattgtgaaaatctccacaggaggttatttaagcaagtcacaaattgatgwttctgtttgtagaaaaactccagctcatccagccagccacattattccagggctgcatggtgtcagcgtagggaccaggctcggtgtagagaccaagggtgcctttccccttcctttccgcccgttaattgcctactcgcccagtggtaccttctgaacttttagaaatccagataggatttccacatggttcattagaattcatttatttttttccatctgtatttctttttgttgtactccctagatcattatttttagttactttttacatgcattggttaggtttttcatgtaatctctcagtaagcgtactgggggatgagtgacctcagtatttaaatttttcataggtgggatgaaatgtcttttctgagtgtgagtatttctgttccattcttcttttccaggcaggctctcattctgtgctgcagtttggattcagggagcactgacccttctgtcaggttgctcctgctatgaaggatggaagggcattttgatacatgaggcataactgtaattatccggtggggcttggtttgtgctgttttccacctcttcgtcatattttggaaaactgaggccaaaagcaaagttcattttcccctttaaaagcttctttaaaaaaatgatgaaagagctttatcaatgttttgaataacccagaaaatatttcttattgttgataatctgcagtttgcaagtgcagcgaatcttgtaggtagatttaccttgagttttttgaaacggtagaattaatrtattaaaacatatggtttttagttaaaataggatgttaaaggaatagagcgcacgaacaaaraactttccacttgaacccatgttgtttcatctgacagtgggtatggtgtccctggcaggatagggcttccacctcctgctggtgccggtaggacagggaagaggtggggaacactgtgtctccatctcccaagcatcttacctcccaagtcagatccctggcattgtttgmatacttgcgtgtttgtgtgtggggtgatgttttcctgagaatgtggcaaaataatagaaggtcccagggttcctcagtctgcagaccatagctgagtggtgtgtgcctctagccatgaggtgaagcataggtgaaattcagatccataggaagacagacagactttgcaagttagtaagctaacttgctagaggaaacggtagactcctgtgctggctgccaactaaaaagcctttctccacagttctgttctcatgtacaccctcaggaccttggatgagcttgtgtgttcaggaaattgggcaccgagattttttttgtatctttgattttagttgatatgtagtccttccaaggaaagtattcgttggatgccctttctacactttggcattgtgcaagaggtatcaaattttaaagtaaaagtgcacaacctggccaggcgcggtggcttacgcctataatcccagtactttgggaggctgaggcgggtggatcatgctgtcaggagatcgagaccatcctggccaacgtggtgaaaccccatctttactaaaaatacaaaaactagctgggcgtggtggtgcgtgcctataatttcagctacttgggaggctgaggcaggagaatcactttaaccararagttggaggttgcagggagccgagatcgcaccactgcactccagcctgggtgacaaagcgagactccatctcaaaaaaaaaaaaaaatrcccacaactgggcatggtggctcatgcctgtaatcccagcactttgggaggctgaggcgggcagatcacgaggtcaggagwtcgagaccatcctggctaacacggtgaaaccccgtctctactaaaaatacaaaaaaaaaaaaaaaaaaaaagccgggcgcggtgccgggcgcctgtagtcccagctactcgggaggctgaggcaggagaatggcgtgagcccaggaggcggaggttgcagtgagcggagatcacaccactgcactccaacctgggtgacagagtgagattccgtctcaaaaaacaacaacaacaacaacaacaacaamacctcacaaccctggtctcccagagcttccatattaataaatctagacaatgtgaaatgcaaatccacttaatatttgatgcaaaaaaawtttatttgacctgttattttaactctttgacataaaatctctaaatcaaaataatcagcaacagttttaagtgtataaatatgtatttctttcagtgcttgaacatttttagacaggaagattcttgatcttctttgtaagcaaatagcatcaaagagtaacatttctgtacctttgtggtatgtaccttgtggctaatttgtccatgaagggataggcattgtgttttgttgcttaagtcgcttaaggcctttaaagcatttccaaactcacctatttttgctctaaggggtataaggtgttaaaaaatgaatggaagttaactcattctcaccttgtctgctaacttccttttgttctttktctgtaagaactcataaagctgtatgcatcagctgctcccaggggccttctaaggcctcagtccaacaacagtgctacaggtgaggaaaggaaagaagrcactatgtcatcatgtcattcttttagacttggtaagaagtatattcaagcagatcagatgctctcagaatcacagcgtgttgtactgctagtaattaaaactgaagtccacrttgaataagaaataattttttattgattgctggcatttgtgagaaagggtttaattagaccaggatatggaggggacttatcgacagttccrttgtacattgttgacatggttattttctgtatctcattttgcctgggaatttgtcattctcttctattttcttatcagtagcactgcttttacacttattagccctagctgtttgtcttgcttatttaaacttgtacatggcacatgctcaaagatttttccaggcaaaatttctttaaagcaggatttgagattttcyatccccttccgtctgctggattattccggtgagtgttaatctcccgcctttgtcttagcctctctgtggtcttcggttgcttccttgttctctgtagatctcctgagttggccattagctgtcaacagtcagcacttgctgcctctcaagtctcttcccctcctggctctgccctggttttgctctctgacggggatctaaattgggattctttccagtgtggaatcctgggtgtccaccatgtcactctgacttccagatgataatgagtgtgaccatgggctgaatgaatgtctctctgctgggattaaaagttagaggaaggcaaaaacagayattgcgtgttctcacgtatacgtgggagcaaaaaaagttgatctcttggaggtagagagtagagtgatggttaccagagactgggaaagggggcgatgaagaggggtagagaatgagtacaaacattcagttagatagagggaatacattctaatagggtgactatcgttaacagtaatttactgtatatttccaaatagctagaaggttagaaatgttcccaacacatagaaaggatacatgtttgaaatgatggatatcctaattattctgatcattatacattgcatacatgtttcaaaatatcatattaaccccataaatatgtacaaatatcacacatcaataaaaaataaaggggaagacataggtgtaggcatagatttttaagctgagaaccttttgacagggaagaccagggatggttttagggtgtggggaatctgtgtaagttggccgttasctgtcaacaggcaacaatcactststctcaggtccctcccgctccckgccgtgtcctggttctacttgccggcagggatctaagttggaattcctttccaacatggaatcctgagtgtccaccatgtcaaaattgtgtcaaaattcrtctgtatgcatttttcttggtagaagggtccccaaaagtcaccacattctcagagacttctgatccctaaaactttagatcaacagtcaataaaaaggtcccagttgtgtcttagtccccatggcagtacttttgaacatttaaaggtggagaattgctactgaggactttgttctgtggatgaaacttcgaatgaggattgttggtgagagttggattgttgttgtatgaggaagtgcaccttggaatctaatggggtcttcacggaggggragtcagttgtggcactgtttgtgtattccattcatcattcatccctccatccaagcacccacgtggagctcagaaagatgactaacacataccccctgctgctcctgtttttctaaggtgtgctgggaccatttacatttagttctttggagaacacaactacttaggatttttgttgttgttgttgttttcctgtacattgtcttcctmtctcccttctggtacccattccaccctctctccccttcctcactgcygtttcataggggttctcagattcctgtgaataaagcaaaccgatgtgcagatatgtgtgcttacacatgtggacgtatttgaggaggtaagagggacctgcacaaggctttagtgagtaagcagagaagttatttatatatagtgagacccagtaaacggygatgtcgcaggtgaggcagttgatctggtcagaatatgcctccagagacatcactggtgaggcctgcatgcatgttgaaaagagtgtatcttacatctaggcttgggtttccccctgcagctcacttatgaataacaacgtatgcaagagatttgaacattttcatgttcaaatgaaacatgaaaagggaaaaaaatttaaggttacggttaagtttggattgtttgcttattggtttggttattggcaattgctacaaagtccagggtgttctttatcagcagcatgcttatcaagttactgacrttcaagctgagtttccttccctccctccttccttcttctccactgacattttttttttttaaataggtagggaggcatttaatcttgtagcagcatgagagtagcttaaatgtccctcctctagcagtatgtttatagcagcgtaggtaaggaaagcccagcttgcacagctgagctctaaagtgcatacatcccttaagttctcatacacacactggccagtgagacccccaaactgcgaacagagaattctaattgaagtaaaagcatgaagtttttctttattgaccatgtagcaactgtggaatcatttgaaaatttctgaaaacatgaaacaggtgtttataaggagttttctgacttaacaaaattggtgaaataccaactttactaaaaactrctaattcataattttttgattaataatttctagtctggaaaagaggaattttttgaaaatcactgatatttttgatatactgttgttttcaaattgagttctcatagtgtggtcggctctgttctatggaattaatattgaacaagctgttctgaacctaagaaaggtttgtaaaaaataaacatgaaggaagacttcattcaagaggtcacttaaaaattattattattattattattattattattattrttattattattattrttattttaagaattaggtctctgttggccaggctggagcacagtggcacaatcatagctcactgaagcctcgaactcctgggctcaaacagtcctcctccctcagcctctctagcagctagaactgtatatgtacaccaccacgcccagctaatttttttttttaacttttttttacttttgaagaggtgagattataggcactagccactgtgcccagccaaaaggtcactttttttttttccttgttggggaggaatcaataacaggaacaccagtcatgatttggtgttttttccagggcagacaaataaagatgatattacgatgtttgttatcacagaatatgtttgcttttgataggggttgggtgctgaagggtaagtggttagaatcattctttttctaagggtacagycattaatactccttgattcaaatcactatttaagttataaatacatggatttattttctaacctcaaaattatagcatcttaccacatatttgcatgcctctcttgagttaactactggtgatgattcttagctcatctgtggccaagtatagataagagaattagaaagttgtttccagcgtgtgaacttttatgattttcttccttggttactgtactcagttcttttttgttttgtttctatacaagatgagtagctggtggctcagatgacccccgtgctgcatgtacagtcccatccagagagtgttgggggctgtgtaaacctcgaggctcagagtggctgccattttcctaaaagagaagtatggctgctgttggcctcaatgttcagctttacaaaaaytcccgtaattaatgaaggtcaaggcatctgcaaacattaatggggtcacaagggacaaatcagttccttgaggggaagttaaaatgctagattgcttaccgctccagacaaggcrttctcaagaagtatgtgcagtttcagcacaaggattaacacggagcattacttgagccatggggtgccttgggggacatggatcagcaaccatttccttttgctcacagcgcccagattttgttctggggaccactcttatctgcactgcatagcagccacacattttgagtgaaattaaccccaactagcattcgagcgtcctcccctcccccaaaagatggactgtaccccacactgtaatcagcagggaggcatttcctggccacagttcaggttggtcccttagaacgctgctcagaactgtggtttggtggctctgggaagcagtgctctctctgagtgtgaataaggatccacatagctccagtaggtgtctgacgacatcttgtgatccggggggaagccagcctaaggacaaagccattgtggggtgagagacaggattggcacaatcactgacaaccgcagtagtagcccagaataaactgtgcctgaaacctaccctatttttgtattttttccagttttaaggaaataaatcccctttattgtatactcagtttgaatcaattatttttatctctttgggattggtttttggttaatctcagcaattcagaaatagctgaagaactatgctgtgggtttagacatcatgcygtgacaaaaagaagaggatcttagaagcgggggacattcactgaagctttatgagcctttcctgaatcccttcaaaycagatcaagttctctctctcctgtgcttagaaatgctgcctgttaagtcacgttggctacagcacccatctcagatcccttgtgattcagttgtaaagtagattcttctgstctgaattagaggccaaaacacaagacagatcaaaaatggggaacatattgcaaatttccccacaaaagactgaaggatgtgtttaccattgattgcacagggactgcagtgtctatgcttttaggcatggaaaatgcagggtttgactatcgagtttagattttaaagttgaggattgtttctttaagaagaaatatagaatattattcagtcctaaaaaggaaggacattctgacacawgcaacagcgtgaatgaaccttgaggacattatgccaggtgaaatcagccagtcacaaaaggacaaatactctatgtgatttcatttagatgaggttccctggagtagtcgcattcagagacagaaaacagaatgatggctgcggtggtggggkggtggggggtggtttggggaagggagtggagtgatggtttcacttttgcaagatggaaaaagttctggaggtggctggcggtgatgttgtacaacagtgtgaacttacttaacattgctgcactctatacttaaaaatggttaaaacggtacattttgttatggatattttcccacaattaaatttaaaaggaagatgagtagtactcgactcattattggatattacatcagggaactggaggtagggtctcacttactagttacgtagctcaggaacctggaaccagactccttctccagctgggcagtcccaggtttgagtcctggctccactggaggttgtctgacttggakgttaataataacctgccttagtcccagagtccttagagggaaaataggttataatacctgagtccatgtgtatcaagccattgctggttccaggcccctggagcactcagaaatggatgacccccagctgggtcaggccaagtcctccctgctgtagcaagcgggaccattgcctcgttccccccacctccacatggaaggtgccttttgtgtcctgccccatctctgttttaacagtcacaagactgtaggcagatctaaacttgtttgcacattattatcacctggggagctttgacgattccaaagccaggctgccacccccacctctagaccaactgaatcaccatttccaggggtgggactgggcatccgtgttttcgaggcttctgggtgagtaccttgtgcaaacaagttcagggaccgttgccctagacactgttcttcccctcatgtctcaacctgggcctcctaccactgccaccaccacagctatgccacctgggatgtgtcccaagcccccacttgtcggggaagcagctggggaggggtctttggccacctctgcagctataaggatcagagcaacacctggcttctgtgcctgtggcccctgctggtgctgggtccctggtccgcactgaaggatccaggcagagtacagtgggtctcccaggtcagaatcccctgggttgcttgttaaagctcacagggctgggccccaccccagggtttccgattcagcaggtctcgggctggttggatgatgagaatttgcatttctgtcaagttcccatgtgatcctttttggggtctgggaccacactttgagaaccactggtctattaaacaaatctttgcaaattagggaggtgtgttgtgggaggaagagactgatagttgaaagaatatttgcctaaatacagtgcctagtatttgccaagtacgcagccttctttctggctttaatcatacagactttctcaatcacatgtaattgcacatcctttaagcagcttttgactgactttggttttctcttttgtggtgattttccttaaactcccgaagggagggtggaaggggcaagagaaatttttatttatttattttaatttaattattttttattatttatttttttattttttttttgagatggagtcttactctgtcgcccaggctggagtgcagtggtgtgatctcaggtcactgcaacctccgcctcccgggttccagcaattctcytgcctcggccttctgagtaacagggtctatgggcatgtgccaccatgccgggctaattttttgtattggtagtggagatggggttttgccatgttggccagactggtcttgaactcctgacctcagatgatccacgcgccttggcctcccaaagtgctgggattacaggtgtgagccactgcgcccagccagattttatttctttaaaaaagaaacttactagttatcaggacacttgtgttcttggtacttgattttgtcagcattatttttaagagcctcktccctccttccccctacctccctgttgagcccaggctctgaaataacataggtgcatgtgaagttcccctacctgccattaccagacattggtgctgggcggccctcacctccacctcctctcacctgaggccacagcggtgtgcaaggatgtggtctgtcttgagtgtgttttcaaagcagctgtttggtctgtgccttggatgtttttccacagataagcccaaaagagaaccacatcttaaaacgcccgtgaccttgaatggtctttccggaggggcggctggatttgtgctctcatcgtctcaggtatgtgtcaagccactgttgtttcagagctggacacaggtgcttaggaaaattcctcactgaagggttttcaggatttacaagttcttgctgtttttgtgaccttstgtggtttctggtttcacagaaggctttgtttcttggttcttgttgctgctttcagccttggcctgtaatcactgggcgccagggagggctgcggtctktttcccggggtgtgctcagataccgtgtcagttcacatgtgttgctgcagcggcagggggccaggcaggaggggcgggtgtcctgaagcacgctcaatttgctgatcagggccttcacttggattttgcacttgccgcagtggagacattcctcgtagctactcagtgtggtttgttttaagtgggccatccgttaattcatgtgacctggaacttggttaatgtacttgccaaggttaaagttgagacgctgtttgttaaacctttcaaagagggaagaaggttgccttgaattcagttccagggtttgggagtctgagagggaggtggtgaggggcccggggaggccctgagaaacaaaatgctggttaaggacacagtctgctcaccgacctcggaagtctctagacgtctaaagaagtccaagcaaggaatgatgaccgaagaggaacctcaagggtgcaggcggctctgggatctcagcacatctcagtgatggaatgagctgccggggaatgacccctgtgggkgctgtccaaagtcagagcagacacaaacgtagctctccaggccccataccttggtgggcaagagggcagcaagtgcatcctcacagttgatggggagagcagcatttcagcctgcagaaaagagaaccacacagatgtaagatgaggtctgcactcacttgcctggtcatgcagagacggagctgggagcagctgcatgacttttcagagaagtggcacacgtttactgtaagggtcccaaatgtagaccactgcagatsgtaaggtctagatggagggaccaatagtagggaagtaggggagaagaaagtaaaaccttacagtataaagacccatagatgctcttttgtttttgatgtgtgtacgggggttagrtatttattgagcacctactgcatgacagagtgttcagcaatgacaatgcagagcttaataagaacaggttctagactaatcttttagggggtgaggatagaacagaaataggtaattatgtcctgagaacatgagagagtgttggtggacagaacggcgatgtatccccaagggcaactgaagccttcacagaagatgcaaagcctgtacgtggtcctcggagtcatgccacatggtgactggttatcttagtcgtaggaaaactgagaagctttgaggcatgttctatctgtctttgtgggcatcatcttcattatttgaacaattcagagtgcttgatgccttttgcttcgttctcacaatccttgacactaagctgtgggcttgggttatagtcactcattctgttattcatgtcattttgcctatccttccacttcacagatgagaagactgagacccagagagggtcatggttttcattagccaaatggtgcagaaacccagtggtcacagtggcyctctagctctttgtcacccacagggcccttgataagagtacggtctttctccaggggagcagggttgaggagtgggggcagccctggcctgggtggccatatcctgatttcccctcccttggcccatagctctctatcttgggtgaggtgagaaagtaaggctgctccttgactgtggtcccttttgtgtctgtcctgcactgggccaccttcccaggggccttgtgtcagcctggtagtggtgctagtggccttgaagtgagagtgggtggatcacacatggcagatctctggcagtgaccttttctgtggatttccggtgactgatgatagcctctttggaagtcagcatatgcatagctctctgtcttttgaaaacaatggaaaaacccaccaccagccccaaaaccagctgtctttcttcttatgaatagatatccatgaaaagcagaagagtagtttcttgtaagtactctgggagtgcataatacattttaaataagattaaaaattatgttttattcttactagcatcactgtcagataattgagcgtgagagcattcagtgctgtgtgcttggtacgaagtagtaacatcaattcagtgttcagtacatccactttgttccagaacaatgtattcaaggtcggtgtattttggctgtgccacakagttctggaaattcccaagagaataagttttcacctgttatataatccagcacaagtgactgtgtagcagcaacctcatgtttcatgatgactttaaaatgcaattgattctaaaatttagcttttaaaaatttcgacttcagattttctctgaaggtttaaggtaggcttctcctttattaattttttcaagaaatatttaagaacactgctctgtgctatgtaccattctaagcactttacagatactaattcatttaatcctcagcctggttaggtaagtactgctattcccaccgtacagatgaggaaacagcctcagaggagttaaaacaagttgctcaggttacaccgtcagcggtttggactacttcagtttcagataatcactgtgaaattttactgttttgagctacacgtttcaaaatcttttctgatgcggaactatcattaaatcatataatccgcttctctggagtcagaggttgacaacacattagcacttgactcgagcctctccctggaggaggacattccgtctgcggggagccgagtccgaggctggagcaactctggaaccacagccctccagtagagggcacacgagagcaggctatctgtggagatakcctgttggcacaggggtgaagatgacagaggcgaacccaagcaaagagagttaattagcagagtttgccctccaggctcggagggcaagtcagcctggggacctggagttagttcccttttcagctgtgaccattgaagacattcatcaagttctctggctccgggatgtcagctgtggtagtgacttgcatgggaggttatccgacatacctcacacactttaactccacctcttcagagtttgtggccaagaatggagccaggtggctattttttttttttaaatttatgtaataacaaacattcgcatttattgaaaacttaaagtataataaaaaaataaataaaakaaaaaaagaaaaaagaaaacttattcctgtgtcaggcacttttytaagtgctttgcagtgtattgtctcatttaatagttgtttaaattaacagagtaggccgggtgtggtggctcacatctgtaatcccagtactttgggaggctgaggcgggtggatcacctgaggttgagagttcaagaccagcctgacaaacatggagaaacctcatctctactaaaaatacaaaattagccacagtggtggcgcatgcctgtaatcccagctactcaggaggmtgaggcaggagaatcgcttgaacccgggaggtggaggttgtggagagccaagattgcatcattgcactccagcttgggcaaaaagaatgaaactctgtctcaaaaaaaaaaaaaaaaaaaaaaaagagagtaaataaaattgtaaggtgaatatgttatctacttgatggaattttttaaactaccttgaaaagttttatagtttcctatttacagatgaaattaacatactaattataaatcatgcctcactattcactttaggcagtctatctccttaaggatctccttacggtttagatagataagtgaattgcttaatgtttttggaagtaataaaactgcatttctttttaattaaacaatccagataacaagaagtaattctaataggaaacttgtaggatgtatttacagaaaatctacacaatcttactgaacaatgtagaaaagaagatttaccagcctgggcaacatggcaagctttgtctcttaaaaaacaaaacaaaacaaaatttagccgggagtcgtggcatacaattgtcatgtccacttctcaggaggctgaggtgggaggactacttgagcccaggaggtcaagactacagtgagccacatttgtgccgctgtactccagcctggatgacagagcgagaccctgtttcaaaataaagaaaaagagatttaaatgaagcgaaatgccattttctctaggtgagaaactggaatattatcaatgtcacttcttcccaaattgatttataatttaaaaacaatttyagtacttctgcagcttgtttggagcttgataaaatgattgtagagtttgtcttgaagctttaatagtgaggcaggtttaaaattgggggcaaaaaagaaatgggttttagggtgtagaagggacttgcctgatcacttttgctagaaataaatgtccctccaaattaaattactaatgtcgcacatcagatcgtatttaaatccattagaagattttactgttccattagagctacccatagctggtgaagactctgcttatagtggaacctagtttctcagttttccatttatatttatttacctgagctttttgtaaagtartaagtacttgactgaatttctgctatttatcaaatgctttttgaatagaaataatgagttaataacatttagcctttttyggtaaatagtataaacaagatagggcaaatatgtaaactacttagaactttatctaccttgcatattttgtacctcttatttgcatatgcatgtcacatgctccttatgtaccatgtgctattactgtgccggggtactggggctatattgagtctatttcctgtctttgtagacttgatggataatttggacagcattgtgatattccaggtttaagagtcttaaggttcaagactacattaaatgttaatgtagtccaacatttcttgaactctgaaatcctctgagcatcttttcatgcactggcctaaaatgttttcatagcccagcaaaaggctgattacttatttccctcctattgattttttttgagatggggtcttgctgtgttgccctgtctgcttgtgaactcctgactccggtgatcctcctgccttggtctcctgtttatgttttaaatagcatttctcaaacctatttgagcaaataactttcctgttaatatgtagtattccttgaaagaattgaatttgtgagtccctaatctagacacttttaaagaagaaacaaaactcagtaacacatttggataaaaacctgaatatgtccattttgggatgaaaggaagcagctttgtttaccatgttgaattaagtggaaaacatcttattttaatcatgattgatagaaatctaaatttgtaaattctgatttttatgttttttttacaatgaaaatacattttaaatgtcaccatccccttccccatgaagtcttcattacaactaattttgaaaatactctctcatttatttatattatatatgcatatgttctactgtataattttaaatacttaaatggggttatctttttgcattgttctgtatcttttttcagcttaataatttaccttgcttataattattgtcagtgcttgcggacctgctctttatgcatttttaaccattgcataaagctggaatgatggacatgatttctttaatcactccaaattagtcatttagttgtttccagttttttagtattacaaataactctgcaataaacrtgtcttgggtatgcattcttttagtttaaaatagtcttgttccttcagaaagttgctcaataatagacttagaaattcttttgtgctaattactgtaattgctcattttaagatctccttttattgttttcatagtatataatcctaaactgttacaactgaaatagtccttgagctaagaaagcaatgtggcttaaagataggatttctaaatagagacttaaaaattaacctttttggagctgtgacttcctgatgaagtggcagcacacaggctgaatatgttctacatctggatggcccaacatcatgatgctgtgatttgcgagaagctctctgcctgcctaggctgctggaggatggcaagttaatttatttgttgttgggagacctccccctgcccccattaaaaaaattattttgaaatacttgtagattcacatgcagtttcaagaaataataaagagtaattccatgcaccattttcctccaatagtaacattttgtgaaactagtacagtatcacagctaggatattgacgttaatatagtaaggatatatgtcatcaccacaaaggtacacctacttcccttctatctctcctctctccttcatgcctggttacaaactaacctgttctctctatataaaattttatcatttaataatgttctgtaaatagactcatagtatgtaaccttttggaactgaagtttttccatcagcataattccttatagattcattcaggttgctgtgtttatcaatagtttgtttctttttattgctgaatggtattctgtggtgtaaatgtactrcattccatgagcatggcatgtccctccatttatttagtttttctttgatttacttcattagcattttgtagtttttgtagtcctgtgtatgttttggtagagttacaccctaagtatttaatttctttgctcattgccagtatatagagatacaacttattgaactcactttttagtttatgctagtttattactaattatcaatacatgctcaagatatgtcaactccttttatttttattaggtgtcacttgctacattttgtggagaataccgatgctgttgctagaaagtgctgctgtcacaaagtgggtttatagatagtaccacgctatccttcttcctaggctagattagaagttatttatgtgctatatgcacatagagtttttgattggtctattgcaaatactatggcatctgaaattttttttttttttttttttttttttttgagatggagtctccctytgttgcccaggctagagtgcaatggcgcagtctcagctcactgcagcctctgsctyccgggttcaagcgattctcctgcctcagcctcccaagtagctgggattgcaggcacccgcaaccacacccgggtaatttttgtatttktagtggagacagagtttcaccgtgttgaccaggctggtttcaaagtgctgggattacaggcgtgagccaccgtgcccggcccctgaatcctatttttaagtataaaaagtcttttttcagctctggattatggtgctgcaagctgatattcttctcatggcagtaaacagagaagtcctaggggtaatcttacccctctggggagtccaggatatctgagcatctcccttttctttttactgctagaaagaatttctgctagtagaatttttattttggccaactctgaccccttaggttgatgtcagaatgaggtgtaccaacctaggtggtcagagttggctcaaaatacgacattttcctgctgagcaatttagtctaggttaagtcatacttgaccatatgccctagtttagcgtccagtttgtgaacattctttacctgagttattgtaattctaatctcttatgtaaaactgcaggtagtcagccctttgtctccttcagttctacatctgcggattccttcaactacagattaagaatatttggggggaaaaacagtaaaaaaaaattacaatacaacaataaagacaacaaatttaaaaactagtataacaactttttatacagcatttgtattgggtattgtaagctagagatggctgaaagtctatgagacgatgtgcatacgttatatgcaagcgctgccattttattgcagagacttgagcatccaaggattttgtatccgtgggagtcctggaaccaatcccccttggatactgagggatgactgtatttacaacatgtctagattttcgacaacttgaattaaaccagaaagaatatgaacacacagaagttcatgtgtatatatatatgtgtatgtgtttagaagggagcaagctgttaaacatgggaaatagttgctagtagtttgtaattttatgattacaattttaaaattcaattttgcaactggaatttgacttgattggttagtgccttacagtaattaacctccaaatcatcagaatgtcatcttgttatttaggtaattgaatctacttttcttgtatacagaatgctttttggaaacaatacactgtatatctagtttgtaccaagaactaattgtacacagtcagatacttgcagttcttttggacttgagtttctttatccttctatcagatgtcacaattccctcttccctttgtagcatatgaaagtagttgtgtgtgcactgtatttgagaatgtcaagtaatagaatctctagaaaacattcatgatttcagtcccaggtaatccagagttaaaaataatgttcataaggaagggtagcaaaatttagattttaatacttataggaggtgtgttaattggccccagggccgcaggctttakcgttcagaggactttagccccaaaggttttgtggaacttttccagagtcctcaccagtacattgggaataaatggaatgcctttggaagtactttgaagattgaattcgatagtgttggtaaagcagtctagcctgctgtgattgtgctattgatgcaaatattctctagcctgtattatttttccttggagctcaggaagtgatccccacccacctcaagcagtaaaggaaagagaggcaggagggtctgaccatgtgaggtgccccaataaagcatctgtattgtaaatcaggaatgtaggtattgggtttccttaaaacaaagcacacctacgtgaccactagctggagcacaatgtgggctcggtctgctgaaagagtcagttggttgcggctgtctaatccaattatggatggtcccagcgctcagcctttcagctgctgcccctcccctgcagactctgcctctctcaccctcccttttagggcttggtctgtggctaccccagaaatcacgtgcactcctaggcttcagcgagtacagccttgttaatctcagacatggaaagcaagttgcctaggtctacagatgagtattcagtttccccaccagttgacctcagtgcaggttttgttggttccagtcatttggggtcagcacctgtttgaagccaggacacttagaacaaggtggaggaaaacctgagggtacatacagtgtggtttccttggctcatctaatgcagagtcagaatgattagccacattgcaaattgtctttactcagtggtttaattgttaaccagggagttaatttttttttttttattaaacaaagaagaaaacacctctagatttttctgggacagatggccccattgaaagaggccatgtgctgcagcgaatggccaggcctcgggtgtggcaagtgccttccagctcagtgcttgctttgtgctcctttgcctatttgaagacgtggatgaatcaaaatctataagcctatttcagtcaagtattctaaggaacctggaaacacaggggatttctctgttgcctctaatacagtgaaaaaccactgtctttttttgttgttgttgttgcattgggggaagaaagtccaggtttgcatgtacattttcactcataggatttttttttagaatagtttggggaggacattgtgctctggccaataactgggccagtgtctggtcacaagatgatcaggcaggtgcctgcatgactgtaggacagagaactgggcagctagagagcctgtgtggaacgtgaagcctttccccactttgttgccgtcctaaccttttctcaagtcatggagaattgatccttagacattccttacctctctcacccacttgaggattgctcagagcctgggtttcggattgaaatagcactatttctggttgrtgacgacattctgtgagccagcartgtagtttaaatatccacaagagcgccctggttccatcagcgccccttcgtaattggtcatgagacttggacctccttcggggctgggactcgggcaagggagttgagtagagcttctctttctgggctcctgggaaggattcatggcataaaagtgggacttcagcattctctgggcacacctgtctctgtttttgtcctctcctgaatctttctggcctgcagagcagaataaagtcactctgtgccaacctgacttttgttcatgactatattaggggcatggatagaaagtgcccccatagcactctcagataaaacaccttcaaacaaacccagaaacccatgctcacaaaaccacccaccttaaattatgaaactttcaggctgactaaatcctgaaggcgttggagcgtgagcaaagggaaaatggtgacacagagctttgcccttcctaatccaaatgaaaagctctgtaaccctccccccacctttgctatcaagaaatgttggacctttgggaagcagatgtagagtattgatccttaaaacagagacctctcaccctaggtctcttaaaacagagaccttaaaacagagtattgatccttaaaacagagacctctcaccctaggtctcttaaaacagagacctctcaccactttctaactgaagtgggttccacattggaagtactttgcagaaacttctattaccgcaattacttttgcaccaacaaatagtatcctcaactcagaaggaaagaattggaacactcagctggaggtgtctggtagggacatgtgtctgctttttgaatcagtcgtatatgtttttgttcctgtgcctggaggccctttgtggtgtgagaacattgaatttggagagggaaagggagacaaaagagaaatgggggtgatgcttaagggaaagtagggtttttagtttgttcaccacgcttgatggcagatttgcctctggatcctcaggccacgttcctatggtgggtagggatctctctctctctctctctctstststgtgtgtgtgtgtgtgtgtgtgtgtgtgtgtaaatagtgatttctctaagttaataaagaatgtggggtgacctcctacacatgcccgtatgctattgtgtaggaacaaatgcatggtaggaatgggtagactctaatctgaaagcatcaagttgtatgcatcttctgcaattaggaatctgctcaccagcacgagtgctgtggtttctgtagttctgggattcagaggagcattttaaagatgtaggatgttrgaggaggaggtgcagggatctccccttgggtaaagagtgggagacagtctctgagtcataatctgggaccagtggaaggtcaaagggaagaactgtcctgttgtctgctaagtcacaggcttccttcctgttctctgagccctgtcacttacccaaggtgcagcaacaattagtgtctgtttacacataacagacatctctttcataaaataatttttaaggcatttgtttggtagaagcttccctgtttgggggagtcttttccctgaatgcatgtaaataacttcacagtttgcgcaagtttgcaaacggtctatactgctcagccttgattgggctacccaaggatgcgcccgccctgctgaggtctgacagctctgggaggccagtgaggcctgtcctaatccctgttctggccggtgattcagctccaggtggaggctgtgcagaaacagccccggtcatctttgtgtgaaatacatttgtcgtcttcattttcttttttcttctgctggtatcttcatggttttcagcaaaactgtgtacattacatttttttctttaccatttctccgtagttatttctagcatttttttttcagctgatgaaagcaaatgaagaatttktatgctccatagtcagtcaaacattgatttctctgacttttaacttagaaagtcattttgcagtggcttgcgtgtgtgtatttagactgtgcttctacaaaaaagcacacgtaggcttatggctcagtttacttgttccagctcactttcctgttcatttaccttcttgtaaaatggaaagacaaacataccttaaacttaactcagatcgtgattgccaactttgttctctgtgtgtaagtagttatattattcctaggttatggcatcttgatttatctttgaaagaagaaaaccctcactgagttgacagggacacattgttytaggcttctacaattgtgctgatgacgctttttcccattggaatgacagggatgataaggtcggctggctagcctttttttaaaatgtagaaaaccacaactttaatttatagcatcatcattttccttatgtatgtagtatgtttcaaaaataatccaatgtcagattcttgcttctgtgatcaaggtcttgtttttgccctttctttgctcaccacytccctgcccctgacgccgagtcctcgccttagaggaggtggtcagcttatattgcaacattgaaaatgttataccttacaaagaaggtgatatgccatttcttaattataatgatgtgcaacagtgacttctgatgtagacctttaacattgggccacgcagctttttctttggaggaggggcatttcaaattggatgatgctcttatagtttaataaagaaacaagcaaacaaaataggctatacagggcatgtgttcttaaactctgtgacagtggaggtgaacccaggsccctttcatggccttgggagggtcctcagctttgggggcgagttatctgggtggaaaagcaccatgggaggaagaagtcagagaggcgggttgctggagctcagagaataaaagcaagtctctgccctgaaaatggccctgatttgcttcagatgtactctgtctgccaacatttagtgtctgtgacttagccaaaggaaatgtacattaactgttcagtttctatgtagtttgtgctctaggattttgcctccggaggatttctgtgaaggaagctctgttcaagtggctctgttccacttgggtttggaaagaggccgggacaggtgatttcgaaggaaggatgaggacaatggaggagatgggcttggtcattgcagtgtgtgaggtggcccagcttatctggcattttggggtactatatgtgccatatgaggtgggtatgggtgtttgaagggaaagggggtggcctgggcaacttgtgtccttgcctagaaagatcatcactctttttatttaaaagaaacatgtgaaagagccatcagggatagttttgtcctccctcttcttacaagtgatcattcccttggtagggcagtgccagaccctgcttgtgagcacagaaaacgccataagctcctcatgaaagcatgtctggggaagcttatctcaaatgcagtttgcacttgcaaaggtcctgtggtatagcgggggagcaggggagatggagtctgggagcggtgaaggctgggtcactagctggctttgtagcctctgggcgtgttgtttttatcctcagaggggccactgcacctgctccatggtctcttcccacagcagacccttctgtctctgtgcctcgaggggctatgtggaaagcagagaaagactcaaccagagtcttcccttaaggaaatcggaaggaaaacaaaattaacggcattagaactgagtatgtattaaaacttctactgtcttacaaaatttagttttctttcttatttttctttccatgttgactcagtaggtaaatggactaaacacacattcatttagggcaggaagaacttcatcatttgattacctttagttcatttaccttataatgcctaaaacaaagcagaaagtgacgttggttaatcaaaaagatcactttcttttttgtgttcttttgtgctattgtgagatgcctcttctccagcaagctgtagttgttcacaaagtaaagctgttcctaagccttcattagattgaagcttgtcccagactttctttaaagaagtttgcatagcttagttcatgctcagatgattcagtgatgatgatgggttgttggttagaaattacttaaaaatgcctaatacattattgactgataaatgttaagacatattctttaagggtctaaatcctattcttgtggagctgcaaagatcttgggggtgtggttgcccttgtctgttgcatcatctttcaaatgcaacagctgtaatgatattctgtatcttgaaaaacttaaaaaagcaacaactaacttatttgtatcttttcctctaatatttagtttttacttcacttgtaacttattacatgtattaaggagtttatttttwtatgacattttactcataaaaggatgaaaccaagattggtgatctgttcacatagattaaaatcctgtttgtgaccacttaggtgtgtaatgtgtgacttgtggactgtgtcagaggaagattttccaaccaaaagtacccattggtatcacagatgaaaagtccttataccatctgaaaaaaagtagaaggtggggagaagcttgaaaacctaaggaggccattaggaaaggctgtatattttctgattccgtttaaaattttaagttggtgaaaatactatgtgatcgaaggatgaacatattttagtaaatagagttatagtgctacaatgagataaatttcacaggtaaatgtgacgtagctaatgcataatcattctttgtgttgcatggcaattctgtacaaatrgaaggtagcatgtttaacgtycctgttatttcacataaatacagactgagagtttcagtggtctggtttgaaagggaagaaatagaagaaggaaggagagaagttggcagaggagcaatctgctctaatatcctccagtacacaatctagctataggtcctcacctggcagggtttgaggatcagaatggtggctcaggtttagacaattctccctgtttgtggggcccagcagctagttaagagaaaaatcttttttccttccctattaccctataaggtccccaaattcattgtatgtagaatacttgagtcagaataactttcctaacacttaggtttcaggtttgttaggtatgcctgacagctctcttatcaactcccatttatttgctaatctaaatgaaagtttgatggtagagtattgtaaatgtagggaaggtgaagtgttcaccttcagatggtagctatttatctcagcaagaagagcagatgactaacacccaaatacataaccattattatatracttagcatttataaggcatttctatgcatcctgagagactagagcactctcaaatgaggtttcagagtaagattmatctttgcaaatgaagacaaattagcaaaatcttcctatttttaaagtgtgccttttgatttgatacctatttatttgtttggaaagaagcttttaaaatcaaaaccatgaatctgtggttatcttcaaaggataaattatgrtaggtrgttgttacccaggttaccattttaagatgattatggctggcccaaattaggggatcttttcatatatgtattatatattttaacttcagtcttttaaaaatgaatattcctaggtggcatgggagggtgggaaggtcaaaagcccaaacttctcttacttattggctgcttccttgaacttagcgtttttcttttggaaaagtgagcttttgtttttggatattttgtactgatactctgtgcctacacagattttgttttggttcaataagagttgatattttgccaggggttgcctcccatgagattccaaatacagatgtaagtttaacaggcttctgaactggatgtttctatgcgctgaaactctgtaaacgcgtgtagctttgtctaccattgtatattgctgtattgatttgttgggttgttttttttcttcctcctgaaaagctctggtctgtcctctgctgatacaaagactggtccattccccagggtcactgcaagagaacctccagggcctggccactgttagatattactaatctgtgaagttgctccaaattctcttgccccgatcataaagttccattgagttcaattttatgtgaaggttctttgtcaaaaggaataaatgtttattcaacagatccagttgttgtcagcattgacagatgtgaaaattagcaaatagcaagaagtctcccctttagaaaaggaaaacaagtacttaaaaaaaatcttgtgttgtcaataaacaagtccattttaaaagcatctttgaaggtgtgtaatgaaaatggaggccttaggttgtatcagggtttatgaggagccagcttatmtgtaatcagatgttcctgttactgttatcactgtagtatagggcttagttctgccctttaagtcacagactcaagttactcctgattttaccagcagtcagaatacatttttctttaaaaggaaaagagacgatatccyagtgcttctctatactaaaacaggaagagaagcttccttgttgaagtgacagtttagatgttgttattttgacagaaatattagtaaatatgtcacattatcccttgctaaatatttatagcatagaacgtatactctgatgcataatattttatgaaagaaatatcttttgcctcaaatccctttcactgttttgacatgaatctataatttatacccagaggtctgcaggaaaaagactttattaagacccttttatttcagccaagataaaactccatcctaagagggaacaccctggaatctttgagacccttaaaggtggggtattctgaaatacctgtgttcgttcctttgctagaatttagatagcttcacttttgcaaaaaggcacaaaatgagggcaatttttgatggaaaattttagtttttgagatgaagcagggggcacagtggcgaagcgccctatcttagcacttaggtagcagccgtaacaagtgtcctgggtattcctccctagaaaggaaatgttggtcacaaatggcagtgtcctctgcattcagttcagctatgtgactgaaagacactgttcttcagcagctgtgagtttacaagatgtcgcacattgagtatttttctctagcttatttagaaacgccagtctagacttccgcagttttggattcgtggscatagttttggcctttattagatggccctcaaaggtacttttcaggtggacattgatttcatgccagctgtcagagatgattttccctagaaatggctgggtatatggagacattctgtattagaatggaggtatacacccatctcttctgtattagagagcaggtgttgccccccgtggtgctcagattgctkagtgtgagaaggaaaagaccagtgataagaggaggaaaactgcgccttccatgtagctcagttaacagcatcatgattctccaggatggccccatttctgtttttatttacaaaatggacttgagaattaattagtaagcaaactgtctccattaggtaagtggcattctgatttgtctgtgtaaagttccatttcccaagtaatgtgttccaaagcatttttatgtacaactactggaaactgctgtacaaatgtttgctgctatttggttgtaacaaaatcagtaatgagtttcaaaatggaataatttcagagcccttcatctacagtagtttgggaaacacttgaaataccaagtgatctgaattcactacaagctctccaactggaaaatgtgcctggtgtcgtcttcaagcaagaatcccccgccccttaaccactgctgctgtggacttgagtcttcaaccttgttttgtagactttagcatttgtattgtgtcatccttgacacctccccaaccccagccttcccagctttgattgcttaccttagcaatgctctcagcttggaccagaaggcacggatgtttccctgaccttaacctcactgtgtatcagctcaaggaagaagccagatttgctgatgttgtaagcactaaattatgttcataacatttaaccctcacatccataagcaaactaagtgggaaaataaagattgactattgtagcagtcatagattgtttaggaagcagcaaaaaggcaaatttttctttaaagttcaaaatggggcgaaagagggtaggaaaggaaaagtttattaagaaaattgtatactacattaatttgactttgccgtctagacttaaattaaattcatgtatttttttggtcttaacacattgacatgtatcagtaagttaaaaacttaaaaatacacaaatgattagattagcattattatgtgtttctttcttgttttttgttttgttttgttttgttttgttttgagatggagtctcactctgttgcccaggctggagtgcagtggcatgatctcggctcactgcaagctccgcctcctgggttcatgccattctcctgcctcagcctcccgagcagctgggactgcaggcacccgcaaccacccctggytaattttttttgtatttttagtagagacagggtttcactgtgttagccaggatggtcttgatctcctgacctcgtgatccacctgtctcggcctcccaacgtgctgggattacagtcatgagccactgcgcctattatgtgtttcttatagaaaatctctctaattttttaataagcatgtttttacaaatgctgtttcctgagaactgtcgcaccacatgcgacatgccatgcatgcgactggaacatgccagatatttgtgggtggtcccttcgtgtcacctgtgccttcttaccaagtaatttgaaacacccgtgtaaactacctttggcaaataggatagctaaatcaccgctaagatttataatttactttttggatatctgaaacatcaacartayagccatccatggcgtgttcctctggagtgtggtccgtgccrtctctgcctgctccatctggctgatcccaggcaggcagctcagctctcagcagacacagatccccagcacatatgaacgtgaaagaggcttctccrtgggagcgaagtggccagcaggtgtcacaggctgtgtgggcccagcatcgtgtgggcactgctgggggaatcccatcacagcatgtgctggcgttagtagtagactgtgtgtgtctcagagggtccagaaagtaatacagtaaaggcgcctgggggtgtgtgggggtggttggttggggtttgcttgttagtttgttgtaaaagcccagcttttcattcttggaaagatttcagccaactcgagagggtkacctgccaggaatgctgcagaagcaagaactcagtgggtgagcacttccatttcttcaacaaatgcttctgagtccctgacctgtgccaggtgctcttcttgagctgagaatcctgcagggaraaaagagataaagaccccatagtcctgtggtttaccttctaatgagcatacttttgtcgatcaaacagggtgacctctctggtgtctctgcacactacctgtatggtctttscgtagctgatggggtctcctgactagtgattggtgattttaatctggattttgccacagcacttattttctaacatatgacttaatttacttaataattgtgtctattgaatgtattcttatacatacacacaggcatgcacacacggacacgaatataagctttacaaggacagaaaccttatyttttatttatttcttccttgtgtatcctgagcactgagaacagcctggcacaaagcagggctcaggaaatgtttgctgaatgcatgttcacactggatgtgttcgaaggctctcactcgcgactcctgttggcttgtggagagtgcatctagctgtaaaagccatggtgcttggatgtcttggggtgctgagcctgttcccccctcatttgggggtgtggtgctatgctggcgtttgggtccatgccccgcatttctgatggctgccccatctgcyctgtgtggggtggcagagttctgtgtacacagagttacatttcgttgttcctggcttctctatggatgacagcagcactgataaatgccacacctgctttctcagcagtcttgcggggtgatttttcctcttaaggaagtcacctgatgtccatgctgagtaggaaatgcatccaaagctttgggagctcagtgttggcccctgggctgcagcccgagccccgttttagagctgtgtctcccaggcagctgtgatgactgctcgaaagcccactcagggggaaggtaaacctgatgcccgggtgtttggacagtgagcatggcgagtggaccgttacctgtgcatagagttgttcatatgtggtgacagatgttgggctgttatttagtaacttcaaattgtttttctttgcgtcggagccatgtctaggttctgagtgcttctcccaggtcagatggagagctcttcatttggggttgggggagcggggtggtgttttcaggtgcccaaggcattccatgcacatgcacctgcagggtatgtgtcatctggggtaagacagagccctcccggttcctcttctggatgtgtgcttttagtttttaaagaatgtcagtatatacattgccatttattcaacaaatacggactgagcattctgttgtgctgacgtagctacttggggttacagagacaaagccaactccattctccaaatggaaaacaaatggaaacattctagtggtagaaacagacaacaaacaagtagacagaaaataatgtcagacagtggtaagtgctatgaaaaaaatacagactcactgattgtgatggagacttttaagttggattctcatagaaggcctttctgaagaggggacatttgccctgccactgtgaatcagccatgagaagacgtggagaggaacatgaggtggtaggccccagcgagggaaagatctccatgatggcatcgattattcgctccacaaatattattgagcacctgctgtgtgccaggcactgttcctggtgtcagggttatagaagtggacaaaatgaggcctctgcctctgtggagcttttattaaagtagggaaggggatgggagggctgggtcacatgttaggtgtggggtacagggtacgtggtgccaggcaggtatccgggtacctttttacgtagggtattcagagaaggtctctagagaggtgacatttggacgaagacctaaaggaaagggargggaaaggcgaggagcttggagagcttggtgcatcttggtgggggatggggtaaactgagtcagttatgtagggccctggaggccacggtgaggacttcggctttgactctgaaaggagatggcagagtttggagctggtgtgtacgttaacaggaccatgctggcagctgcgttaagagagactgtaagggcaaggacagaagtagagagaccagtaggagtaggctgttgccccagtgtagggcagagaagatgaaccttagaccaggatggtggagatggtcagtggagagaagtagtcagagtctggaagcaccagcaagactgtctggtgcacacaggatgcacgtgggatgtccagtgaggaggatgagatgaggttgggtggctggagcctggtgagtgacaggcagagagggctattagatcacatkggccctggagccatggtgaagaatttggattttgttctctgtgttggaaagttagcagagagcttatatggggggtgagatggcatagggacaatgttaataacagcaacgaatatttattgagcacttactgtgtaccagctgttgcaacagcctctcaagggttcgttctgctattagagccatgttataaatgaagaaactgaggcacagagaggttagctaacttgtccaagatcacacagttagggacaaacttgacagaattatgtgtgtcctggtatgtatttcagttttctttagggaaggtaccacaactttgggtaactatgcccctaccccaggatttaagatgttttgatggttgaagggcgatgtttaagagtgggaccagagaatattgaggtattaaaatctcactaaatctgtattcattatatctgtattcatggtataattcatgtgcctccccctttcgtgagcccctcaaacatgatcatggatatgttttctccacccgtaaagtacgttcatattcatagaaaacccacagagaactgcagacctgaaggtttctttgtaagagctttcattggatagctagaagggctgcagtaagtttaaaaaaaaaaaacccaaaccaccctggattccaggctgcacagcctctaggaggtgtgggtaatccctttataaagcttggcataatttctgttaagacttgcttattttgctctcagcttgctatcttgatatgtttgcctttgaggaggttagagttattgtgatttaatcacagaccatgtatttcgcaagattcatttggtatctccagcttgttttcttgtttcctcggctgtcagtccacaggcagaggtgggaggcggccggcatgggggaccgagtgtggtagaaaggagtgtttacttagcggaggggagtgctgagggctgctgttaccttcccagaatggctgatccccagcagtgatgagcaggctgggatcgtggtgttaaatttggtattttctagaaatatatagcaggctttcccctccacctgccccccttcaaggtttcgaagccttgtgttttgcaagagttgagaggggaacagttaatagcttggattatcttgtctctggagagaatttatgtatcaattcaccggaagactgctctggtattagggcaacaagaatggttttatttctcccttcctttcctgcactctgttcttatgtaattcttgtattaaaaccattcctggtaaattagaacatgctcttgtatttgggccctgctttgaagaaggctgctgagtctaaaaagtttggtagcctctcgtttctcatggtgatttctgagatttctagggacttggtgttttacagagcttgttgagttgcacaaaccagcctccttggcccttctaggtgataaaagatgctgggctgggagggcagctgtggaaaagggtgtgggcgagggagacagtgcttcatcctgcctggatgaagcatgttggttgttggtttattcataaattagaaaaatatattaagaattgaagttgttccttatctcataagatttctagcaggctgcataaagtctgtagatggtaatatccatttaaaagtggacaatgaaaaaattacctctttgggagttgtgttgctatctctaccccaatttggcaatctttaattaacttggcaacccccgttttaccaacaaagaacaacctttgattaaaaaaaaataaaatgtcagggagtgaaagatacggagtgtgactcagcagatgggaattcctttaataacacgctgggtgttagcgttagaaccgccactgaacagctctgcaggatgccctcccagccctccctccrcctatttggattagaccaggagactgcagcaaacttctcaaggggaggcgaacttggtgttggtatctgagcgattgtctgtttcaattgtttccctctgtcttggaaaacaccggcacaaaacacaaatccagtcccagttcctgcagctgctggggcgaagcaggctttttatgaatgaggcccagaagggggaggagagggcttgtgttacagcagcagttgggtaatacatttcattcacttgcagccatctagcccaggcttcattttaaaggatattgttcatttttggcaattcagattagactttttttcttccttgtgcaactgttggtaagttagaacacgaagcatgtgtgtgcattctttttgcttgcttttttgagtgtttgctcctttagttgggataaatggtaggagaggtaggaaggctttgtcatccccggggaccttgcttacttctccctcccagcaccacttaagagaagaggaggtggcctccctctccccaacctcagagccctcaaagcccttgatagtgagcctgagcacttgttaggaggtgacttctacctggggtgtgctggggtccacatgtgccagtctctctgccctgctccccgtgagcggctctttatttgtggcccttgaggccccattgttgtggccaccaaaacctgaattggaagctgtgtgacaatgctggtccccctccctgcactgcttcctgctgggggcagaacaaagagagcgggcattgtctctggcataaatgaacctctatcaaaacaaacacccagagagaggggcagcctgrttacagctgcctgtgtgagcctcgacagtgggcctcattcctcacaaagggagctttgaggcccggaagaggcctttccttgatgatcgagctgtgcacagggagcaaaccccaagccgactgcttgtctgtgccaccctcaaamaatgatttccccaaattggacagcctgggtttgtatccttgagcacrgttttgggaagagcattctgcatgaggcattgtagctatgtrtatggagtataattctgttttcaggttgctctgccacagaggttaagaactccctcttccaaggtagacattgagaacagagacgaccacactgggttttcmctgcagcttttaaacaggatgactcccagcccccatccccgtggctagcagcaagcagggactctgaaacactgcaagccaatggactgagcatcttacttttgctgtccgtgttttggtgttttgtaaacccatctggtaatgaccctgatgccccatgtcccagcaagggcataggtacctgccattgtgcaccaaagtccctttcctcatggccctggctgttctcctgcatggggtcatgtgtgtcccgttaccaagttrtggccccttttcaaccttgagtgccacatctgggctgttgtaggcatgggtagtacaagctgggtttgttactctaaaaatgaaagggaggatcagttgttaataccttcctgtaggtgcgagagggaatgagttgaggattcgatcactgtttatagccagtctcggatcctgattgtgaagtcattctttctggataataactactatatccagcatmttgagagtataaaataaaggcacatgttgtacgtcatctctgagatgtagcgatggcttggactttggaggctgatgagagaaaactcatggtggtgagctggagcagggtgtggctggcggattctgaaggtgctagccctagttttacagctgaccagggaaggtcattgaaccctacagtcttggccctgagagaaccttggaggacttaaggatggagaaaggtgacaaaagagatgcaagccaacagcaattttgtggaacaaagtgtgtacaggatttgaacttaactctgcgaaagacaggggttgcttgtatgcacgaattcacatctgaagaatgcatctgattgtggctgcaatttctgtggacgtgcaaacatctacctgtgcattttatttgtctagcatcattgaaagagttttttgcttgagttgatttcccaggtaattgaagcttacttctcaaagcacaagatattttttctcatatattarcggtcttaagtgagtgagacccctaagaattcttaattcctttatcttacttttcctacaggaaacttattatgttttcctagataggaattgtgctaccaaaaatgaaaagtaaacgtaatatgtaatgttctactggtaattgtttccattttaggttgacaccgaactaatgatatttaaattgtagctgacttgaaacacagtgaaaaaatggtttcctgctgtttttttaaagctggattcagtaacatgaaggtaattaaaaatgtacagatctcagtaatagacagtcatatgttgcttaatgacagggatatgttctgagaaatgcattgttaggtaattggattttatcattatgccagcatcatacagcgtactttcacaaacttagttgatacagcctactacacacctagggtccatggtatagcctgttgctcgtaggctgcaaacccgtggagcatgttgctgttctgaacgctgtaggcaatggtaacacagtggtaagtatttctgaatctaagcatagataaggtgcagtaaaaaatatagtgtaaaagataaaaaaatggtacacctgtatagggcacttactaggagtcaggcttgcaggaccagaagttgctctgggtgagtcagtgagtcagtggtgagtaattgtgaaggcctggataaatactgtacacttaggctacacttagtgaatattacattttatttatttatttatttatttatttatttatttatttatttatgagatagggtcttgctctgtcccccaggctggagtgcagtggtgcaatcacagctcactgcagcctcgaccgccaaggctcaagcgatcctcttacctcagcctcctgagtagccgggactagacgcacacaccaccatgsctgactaatttttgtgtttgtagtagggatgaggtttcaccatgttgcccaggctgatctcaaactcctgaccttaagtgatccacccgcctcggcctcccaaagcactgggattacaggcatgagccacggcgcctggccacagttaacttttttaataagtagaaggtgtacactcttaaataactataaaaagtatagtaaatacataaaccaataacatagtcacttattatcattatcacatattatgtactgtgcactgttgtacgtgctgtacttttatacagctggcagcacgggtttgtttgcaccagcatccccacaaacatatgaggaacatgtacatcttaccacggttgcaatgtcactaggcaataggaattttctagctatattctatccttacaggaccactatcgtatatgcacttcatctttgaaacgctgttagctgcctcatgactgtatttctattcctcagtcatgggctcaccatgcagtacacatgtgtggtcactggagggaatggaagaacactgaggaaatgcatagcctgtttcatatatttattacactattatttatttagaggaatgttaagaaatcttgcttttatgtagttttagaatgccatgaaatatctagttggggcattatctgccattttgcaaggtaatcttccacttctgaataacgttacaagtaacccgcgtttggaggactgatttgggactaaggcaaggaatttaggaggcacaagtagaggggaagaaataaacacatgacttttgtttttgtttttgtttttgttttttgaaagaaggacagtggtttgcttgttgattctgctttgagaggatggggatgcactccagagaaagtgaaacggggctatgggaggaagagagcagcgcacacacagcacctgcatttgattgtgaatgcgattgtgactccttaggcaggaaggagagtgctaagaccgtcatcatggacactcagaaaatacctgctaatccgtttactggaagatacagggagctgcagataattattgttttttaagatggagtttcgctggagtgcaattgtgcaatctcggctcactgcaacctccacatccccagttcaagcaattctgcctcagcctcccgagtagctggaactgcaggcgtgcaccaccacgcctggctaattttttgaatttttagtagagacagggtttcaccatgttggccaggctggtcttgaactcctgacctcaggtgatcctcctgccttggcctcccaaagtgctgggattacaggcatgagccgccactcccggccgctgcagagaatttttaaaataaatgatagattctcacagataagaagwacaggataattatttgccaaagtttgaaactgccattatattcaaaggcattctcttttgggagtggttttatatttaaggtttgaatttagatgacctcaatcttgaggtgttatcggagcattacaggggagtcttatatacatgcaggtgcgatttaatttgaagatacttccatttaaactttatgctgccagagttggccagctaagcaaaaagaattctgataggtcttattctcctccccatcccacacgctgattttttttttctttgtgtttggccgaaacattttacatttctcatttttcacagagctactgtttctctaggattgttttccctgaagtgtgtaccctgtgtttgggcagagcagcaagaccagacttccaaatggcatgctgcgttttaatgtgctttcataattgtctgttccaaaagggtgcctgtgtgtgtatggtgtgtgtgtgtgtgtgtgattcagagcacctgagagcacactgcccgttgtcccctccagcccttctgaaatgcaggccaccctttctgtttcagttgccccttgggtggcagtctgtgataactcaaggtcaggaggaagtatttgttttggttgtcttgtttaactaattaaatctttaatcttggtccttaaaagaaactaaaataaaatcgtaaagtagttctgataagtccttgccataaattattgcttttgtaaacgcacataaaggactctgaactgttgctactcataacatttctgacgccaaatgtgtggggttttgccataccaacaaccagttstctaactctccagacaccaactgggggccttacaattcagtgcagttctgacactcaccacctggagttagcacagactccacagggatgagggttcagtcccacgagtctgcccttgctgcagatgcgagtagcaggtatggggtgcccacacttctgtctgacttgcctgaaaggttgagagtttgttgccaggccccttgctttcaggtctgataacttgctaggttattaaacctgaaacttgataacttctgtagatgttgaaattagaacggcctcactcacctgggctcacaaaattccagaaagtagttgacgtcctattactggtttaccgtgaaggctctatgtccagagtggacaggacaagtggaagagtggcacagggcgaggtgtggggggtggcgtggagctccttttcaggagtctctaagaaggtgggactccagcggcaatgccttgtccatgtgctaagccagccgagggcgcacgaagtgctgtgtggtgtccaagctgacttgggagggacmagtttggggccagccccccagcctcmcttgtcatgtcccacctctgctggcatctgtgggcttaaagtgccttcactcccatccttttcaactatttcttgattaaaaaaaaaaaacaaaaaactgttgaatagtaggagactctctctctcattggtatttgtgggaataaatattaaataaacactttctaataggtgttaccaggacgcctaaggaaattatctcacagagttttcaacactgtgaaaagagaagctgactgccagggagagatccctttttcctagtccttgtgaacatgtgctggacagccaggagtggcactgtggcaagaaacacccgttctctggcattagtaagagggatatagccaagggtatctgtataccagtgttaggcccatacatccataaaacattgatgtgagagctttagggcacagctgaccctaagcctaacgtgatcattaatgtcatgaaaattggagaattggtcaggcgcggtggctcacacctgtaatcccagcacgttgggaggccgaggtggatagatcacttgaggtcaggagttcaagaccaacctgggcaacatggtgaaaccccgtctcaaaagaaaaaaaagaaaagaaaattggagaatttataacgtctgatgtgacctgttctttaggtgttgaaattagaacggcctcactcacctgggacattcttcagctcaygccctgtacctggcttacagttgctcagtgaaatgctttcttgattgtagcatggtgggatttttataaatccaaatgacttagaggtaggtgtcacatttttagcagctaaaatcatactaatcgtaaagctcagattcctgtaagtagggcgctgagcacaggctgcatcctggatatatgaatagatgaaccagatcgtgtacatgtgggacacgttctttgtcctttgggactttcttttgcttggatgttggtagtaaccatgtaagttcgggcagctttctagaaactttccttgttgtgcaacattatgcaataaatgcactgctttgtgatatctgagacgttttggttttcttcagcttgtttgagttaaatttagactcctggcatagttttaggtttgaatgcattctctgagataggataaggaccaaaacatccactcagcagccagatgggattttatccttgtgctgccatttttgagactcatgcctctgtttcactctctgtaagatggcattaatagtgagggattgttgtgctgtgaggtttaaatgagctaatccctgtgaggagtttacagcagggcctgggccatagtgaaacactgtgtatgtggaagccacttcacttttgtcatagctttgttgtcattagtgtataccctgtctccttgccgtttatgggtccttctttcaagcagtcggattttctgtctgacatagtataagtttagaggaaacaatagcagctgtaagataatagtaattttccttctgaaatcattttggtgaatttagtcagaatatctgatccataaactctcattataaaacattgccttatgattggagttttttctgagaacagttccaatgaacatgattttttggtggtgaggtactatttctgtgcagtaatgaagttgtgaggacacacagataccacatccatgttgtttgggaattgtttgggaaaggtacgtgggatagcctggcatggggaagaatgatgttagggtattctccttgaggagctcagaataaccaaaggtaaagcatttggtggtataagatatattcatcttaaaaataagttgaaaataataagataytgggagatgttagccaccgaagtaaataactacagtgaaatagctctttattaattttgaaacctaaagttgaaagagttccgtattatttgtcagtatctttatcctcttcaaaaatgtttccagctttgggataaattgtgaataattgtttcactttgttttttaatattggctatgtagtgattttgcattgaactgtgatataagaatgatcatcagccccttgagattactgtgtgtacctgtgtcaccagtggcatataggggcttaaaagcaagyaagtttaatatatacattcattgagaacacactgtagactgttaggattttcggtgctggagccatagtgatgaatatgacaaggccctcacccttgaggtgcctatagtcgtgtggaacctaggtcctcgcagggactctagggcaggtatgttcttgaaagatttttttttttttttttctttttgaagagacagggtcttgccttattgcctacactggagtgcagtggtgcggtcatagcccactgcaagctcaaagtcctgggctcaagaaatcgtcctgtctcagcctcccgagtagctaggactacaggtgtgcaccaccatgtctggctaatttttatttgtattttatttttatagagwcagagtcttactctattgcccaggctgatcttgaactcctatctcaagtgatcctcctgcctcagcctcccaaagtgctgggattacaggcatgagccactgtgccctmtgtaaaagattcttatcaacagttaaaataagaagctgctcaagacatttacctatcctgaatgtttcaggccctcaaggtgccaggtagctgcaatatagttctagtgtagaaaagaaaaccctgaygaggtctatatattccaggactctgtctgaggccctttgacactccgggggcaccctgccgtgaccctgactctttcctgcatgtactgaggatggaggtagcctatgggtggcacagagatttgctgtctggctagcagtacttcagggtactgggtggcttgaggacctcctgttagaagcttggattcacttttcccaaggcaaccasgattggattctattagttctgggtcttgagagcctgcaagggcttccttctgcgaaggtgagtctgggagagacgccatggagtcagtgtgagttctgcagcctcccaagttccgctggcgtgagaggcttgcctggtgccagggctctggrcattgggaacattgcctggtctaccgggcaagaaacgtgaaccaccgcagtgaactggcagcgcgttggcatttttccctccatgtttttataaaaccgctgagtagacaccagattataaatcctgtgtaaatagtcttgaagagtttctgggttcagccccagagaagactggtttgggttttgaggaatacttcaagaaaatgtttgttggttctgttttccaacgtaaagtgctgcacaaggactgtgctgtgagatccaggagtgtcttttcagccctcagtgagtgcctgcaggggacacagctgctttggaggaaygtggttccggagggtttcccactctccatcctagttgctaaagtcacgttccacgtattgtgttctgatgatagaatgaaagcccactccccgcaccctggggtctaggtggggaaaggagaggtgtatatgggatagccacggggtttggcatgagctcagtagagacagcaaactgacccagacagactcccgctttagggaagctgggatgaactaagtgaaggtgggtcatgggagcaatgctgaaccactttggtggttacagtgaaggctgctacacacccagctttgggaggtggggcccagggtgtccagctttgtagaaaggcatggtgtgggggtggctggcggagggggtggtgggtggttttcctcttgaatctctgagaamcttgactggtgtactgctctctgctttcctaaggggtccgtagctgtgctggtggtttgcttggtatctgtattacatccactctgtgcttcagcctgtttgtccagttactgtgtctagtgaagctagcattcacatattttagattaaattccacactccacccccaaattaaaaccctgctatttaaggtaaaaataattttaaaatgttttattttggtctctttggataaattaatcttgaggaaagcaatacttactgaatgttgatgtgtgtatatgtctttctctttgtaccatacttaacaggcaagtaactctcttgtaaaatcagattctaaatgattttcttttcttttcttttttttttttttttgagacggagtctctgtagcccaggctggagtgcggtggcgcgatctctgctcactgcaggctccgcctcccggcttcacgccattcttctgcctcaacctcccaagtagctgggactacaggcgcccgccaccacgcccggcttatttttcgtatttttagtagagacggggtttcaccgtgttagccaggatggtcttgatctcctgacctcgtgatccgcccgcctcggcctcccaaagggctgggattacaggcgtgagccaccacgcccagcctctaaatgattttcttaagtgtaattcaggagttggcaaactacagcccatgctgccacatctggcctgccacacctgttgttgcacataaagtttcattgagtcacagtcatactcatttgctttcatattgtctgtagacaacctagaatgttagaaaattctttctctggctggacgcggtggctcacgcctgtaatcccagcactttgagaggctgaggcggccggatcacctgaggtcaggagttcgaaaccagcctgaccaacatggagaaaccccatctctactaaaaatacaaaaattaaccagatgtggtggcacatgcctataataccagctactcgagaggctgaggcaggagaatcacttgaacccaggagttggaggttgcggtgagccatggctcatgcatgtaatccttgcactttgggaggctgagacgggcrgatcacaaggtcaggagatcgagaccatcctggctaacacggtgaaaccccgtctccactaaaaatacaaaaaaaaaaaaaaaattagccaggcgtggttgcgggcgcctgtagtcccagctgctcgggaggctgaggcaggagaatggcttgaacccaggaggcagagcttgcagtgagccgagatcacgccactgcactccagcctgggtgacagascgaaactccatctcaaaaaaaaaaaaaaagttatttctctatgtaaacaaagaaaactctccttccttataacttgtatgtgttgggtctatttgtattctgtgaaccataagaaataagtcaactatcagctgggcgtggtggctgacgcctgtaatcccagcactttgggaggccgaggcgggcggatcacgaggtcaggagatccagaccatcctggctaacacggtgaaaccccgtgtccactaaaaatacagaaaattctctgggcgtgttggcgggcgcctgtagtcccagctactccggaggctgaggcaggagaatggcatgagcccgggaggcggagcttgcagtgagagatcgcgccactgcagtccagcctgggtgacagagccagactctgtctcaaaaaaaataagtcaactatctcaaggtaattacccttttgaatacttgaggacatcttttctgtgccctctgaatatttccttccccagataaaatatttctagttcttttacytgttctttgtttcagrgttttaagtctccatttgataaagtatagtttaatagccttcgaaaccacatcgttgagatttaaaaagccctccttgagagacatgaccagtagaaatcataccaggaccgtttagcaccctaactctgggagccatggctcttgggatgcggctgaagattgtgttatcgtcctgaagctctcttggacagctgagtcaatgactggaggtaggaaagttccttgaactctttcttgtgcccttccagctgtgagctgtgtcaccattgtattatttttacattgttgttgttcttgaaaaagcttttttttttttttcaaggcagagtcttactctgtcgcccaggctagagtacaatggtgcgatctcagttcactgcaatctccgcctcctggtttcaagcatttgtcctgtctcagcctccccagtagctgggattacagacgcctgccaccatgcccggctaatttttttaatttttagtagagatggggttttgccatattggccaggctggtctcaaactgctgacctcaggtgatcctcccacctcagcctcccaaagtgctgggattacaggcgtgaaccaccgkgcccggccaaaaaagcttttgaaaacttcgtcgtataatattatggccatccttccaaacgtgacctttttatgttgtattttatctaactaatttgcccttgcccccaacttttatcttggaatttcttacgtattaatatactgtcagggtccctgcttggggcattgtccttgggcttgtcattagataactccaagttggcttgactccagaggagctgccttcacacgtgctgtgaaatgtactgttgttgaccagagaccatcgttatcattaagtccacaaacctgcttcctgtctcttaggctgttccagtcttctatcgaaaaacagtggtttaagtggcttctccgatagtgctggtgaattggaagcttctcgtcatcccccttggctggggcgaggcttacttcctggggccttggcagttttgatctaaytgacttatgttacctttctgtattaatcaagcctttttattttccatacttctgatgctttgacatcttggggccttgctgaccctgaagagaccagcccccctagggttagccagttcctaggtagtgaatgagtacaatgctcatatgcaaaataaccaatccaaaggccacgcccctcactcatatgcaaaataaccaatccaaaggccaggccycttaccacctttattgggatttcatactccaggccaatattgccctaccttaatcaccctagggccagataccaggcaagagacagcccctacaccccagagcctgtcagaattactccagccagctagtcctaaacctgcttaccttgtgtgatttattccttcccaaggaaaccacaataaaggctctcctccatgttttcctaccattccctctgcctcaggaccaaccttggttcttctccgtgtggccccttggcatggtgcactacctcttcttggggactgtgagtaacagactttttcagtggcaattgtcttttaactgttggcctcaccgtacctgaatagcagtaaaccctacatcttaaaatactttgagattgtcacatacagtacccagaataggtgaggatgaaggcaatttactggatgcagagcggccccagtccattccttatgtccgaatgctaagacttgagaaaggtggagaggagcctgactatcaagagttgccttcttggatgaagtgggctgaagacacacgaaccccttccattaatacatctacatattttccaccattgtaattgtattaataattggagaaaataacaatgactgtcaacaacaatagcttaatccagtagagatgaggtccggaataggttctggcctacctcagttcatgttttttactttcaatgctgaagcacaagcaaatgcaaaagcttctcttgaatgttttgtaaattgtgggataattgaggtatgtgacatggttaataacccagtgtctgctcattgagcactgggttattaaccatacatagcaaatggagcacatcatcgtgggttgcttgcgtcactagatcctgttgcaaaaccaagattcaactttaaaatacattttaatttaagttactctttctggcatgaatgatacatcactttggagcaacacttaccaggcagtgaaagctttttttaatgccctgtgtagcactgctttcggtgcccttatatgatttggatggatggatggatggatggatatagccacagggtcttgctctgttgcccaggctggagtgcagtggcaccatcatagctcactgcaacctcaaactcctgggcttaagcgatcctcaacctcctgagtagctgggactactacaggtatgtgccactatgcccagctaatttttaaattttttgtagagatgggggtctcaccgtgttgccggggttagtctcagacttctggcctcaagtgatcctcccaccttggccttccaaagtgctgggattacacgtgtgagccactgtgcccagcctgtttatatggttttaaaaacaaaaatgtatatgctctcaagatggctttcagagagcttattagtgtcttggccatttggaattccatttcacttaaattagaagagtgaaagagaaatgaatggaagaccaaaaatggggagaagaaaytgtatctgatataagcgtggctctacctgggagaatggccattccgaattactggaaacaggaagaagacttgctatgatgcttccttatatctgtgggggaaaatcaaacttacattctgaaaggaaacttaatacttcatgtttttaaacacaaaaggatattttttcagagtagcagttataaagttgttagtttaatcttttagttcagctttttttcttaccagaaaaataattagtagtacaaaaatttatgcgtttgttttagctctattctgatactgttaagaagatacatgacataaaaacaggaatattttcagtcagtgattacaatttaaaatcatattcgaaatttaataaaaagtttaaaagaaatcaccagcataagatgttgtcatttggctcttggggcaaaccagctctcttctggtgaaagaactttctggatgaggtcgaaaggcaacagaaaacctggggaacaatggctgtctttttaatgggagttgctcctattcctggtggtaacaacctcttcctgttgctcctttccgaatggaattgcctcagtgaagttgttgaagaagtgaggagggcgaaatatgcccatccttctacagtggggagaggcctggcgcatgaaagcaggcctttgtgtatgccgggctgggcccatgcaaacagggcacaatcaggctattgtttgtttgggaaaagctatggcatcctattgcaattatttatggaagaaaatatttgatgtttttggaagaggttaggtgtggggggtgatgagggagggaggaaagagactgggcttacctcttgtcccattcactccaaatctctcagtgcgtaggatagggtccatctggtccaaaggagagttttgtgtgactctgygtgttggagtgttttcgaaatgcagagaaattcagagcttctctagctttggctagagaaggaacaatggaagtgagtcttattctacctaagtttgrtgtggggcagcctgttctgtagttgccttccaagcccttcttctttctgatgctttcttggtaccattgcccacatgctgcctccaccctggatgaggtctagacctgttacattgattctcaactaattaaaagtcaatatggtaaaatatttgyagcattccttctccttccctgtgttcatttctgaagctcaacagtcttccatactcaagctgtggggaggtccctttctcctttgacaccagccattttgtgatctgccctttcaggccaccccagccaccctactttcccagtcttgcctctgcctacttcacctcttctctcgaacctcagaagcttctggagtcttcacagtggccctaatcatgggtctcatccttgttttcctgtctctttgaggttccagcagccagctttgcctcatcaggcctttctctgaaattcccatcaataactacaagatctgcccagtaccttgtgcatatcaggtctcaggaaattgtgagtttcttgtttcattaarcatttttctttccaggaatcatcattcatcgcattgccatatgtgtccagatcccccttttcagggagccagtaattcgaaagcacttgcctgtgttgaatatggtggaaaaaacaaatgtcaaccctagccggccatcactccccatcggcccaccccattctcttgtgccagtaggacttgcctgtgttttctttgggcagttcaaagttgggctcttgagaagttgcctgtaaattcaattgaagtgaccagatctcatccttacccactctgtagctgcagataataaacactggggacttcccttgtgcctgtgttttaatgtaaccttaagacttgatgctccctggagtgtaagaatatgaatagctactcgctgtggatattgcagttaattactccttcctgtcccatgtggtccccagaggaatatgagattgccacaaacatggcagctttctttggggaggtgggagagggagatgaatcttggggcaaggcacattctcataaccatgtggctccagaaagctgcctgactcagagaatggctataaatgcccggttgtatggatctgagatcctcaaagccaggttcattcacttatttattaatttaacaaacattaggcagctgtggtgctctgtctgctccagcagtgatcaagacagaaaagatttcttcaatgctgcgtgtggtggctcacacctgtaatcccagcactttgggaggccaagacaggcggatcacctgaggtcaggagttcaagaacagcctggccaacatggtgaaaccccgtctctactaaaaatacaaaattagctgggtgtggtggcccatgcttgtaatcccagctactcgggagtctgaagcaggagaatggcttgaacccgggaggcagaggttgcagtgagtggagatcatgccactgcactccagactgggcagcagagcgagaatctgtctcaaaaataataataataataataataataataataataatagtaagaatactggggtggggatggtaggatgcacagtaaagagaataataagctagtgatgagcatctaagaagaaaacacaaaacagtactgtcatcacaatgcaggagtgctgggttgggggccaggtgtggttgaggggtgctgtattacgctgggtagtcattgaggcctctgtgaaaaggtggcatttagactaagggagattggaaggtccagccatgggaagttcaggagaaaggataagaagaaaaagctgtcacatgggcacagactgatgaccagcaaggctggaacttggaagatgagggaaactgagagtgattgtcagctcaggctgctttgacaaattactgtagcctgggtggcttaaacaatagacattgcagcattccctctccctctctgtgttcatttctgaagttgaatagtcttccatactcaagctctggggagatccctttctcctttcacaccagacatttcgtgatttgccctttctgaccaccccagccctactttcccagtcttgcctctgcctacttcacctcttctctccagcgtcatggttggagaagcatattctcatggttctggatgctgaaagtccaaggtcaggtgtcaacaaggtctggttctagtgagggctctcttcctggtttgcaaacagctaccttctcactgtatcctcayatagtggtgggagagagcaagctgtggtgtctcttcactgattaaggacattaatccaattgtatcagggtctcacccttatgacctcatttgatcttaattgtctccttaacagccctaccttcaacagagtcacatgaggggttagggttcctacatatgaattggcagggtggaggtgggaggtggccggggrtgagacacaattgatttcatagcgtcgagttataagatgggtcacagtattagatgggaccagagcagagagggtctgtaggccatggcaagagtgagaatttactcaatacacagtggaagttggggatgagtgagaagcacaagagtggcacactgatttctacaacagtcagtctagctgctgggtggagaaggggagaaggaggaatagtggaaaaagcagggagaccgcttaggaagctgctgggaccgtgcatatgagagatgttggtggcttgaaccagtgctgggtttctcagcattggcagtattgacrttttgggtgarataattagttggggagtggcagggcggggggtaggggtgcagtcctgaaccagtgccaggtttctcagcattggcactgttggcattttgggtgagawaattagttgtggggggctgtcctgtgtattgcaaaatgttcagcagcttcactagtctctacctgctagatgccagaagcccacccaccccgccccctagtcatgacaatcaaaaatgtatctagacattgacagatgttaacctgggattagggggtggggagaccaaaattgtaccctgttgagaaccactggaccagagtcatagcaatttgyagtggatagatttaggaatatttgaagacttgtaaaatatagcctgaagggaatggagactgggagagtgaaagatacctctgagacattttggcttggacagaacagggggtggaggcttccattcctgagctgcaaaggagtggggagggaggagcagygtagtttgggaagtgtgtggtggagaaggcagatgggrcaggagctctgtcttgcatctctcaggtcagaaatgcctcagacatccagggggggcaagctaagatggagttgaacacagcagtgtagggctcaggggacaggccaggaatggagagaaacatttggcactcatctacttgtagcttccctgtcgagaaaaatgaaatcatccaggggttttcaaattcagtggtctctggaccccttcacactgttaaaaatggaaaaccctgccactgtctacatgtttatgttgccccagtaatctatgcattgaaacctaatcaccatgtgatgatattaggagctggggcctttaggaagggattaaatcgtgagggtgggggacctttatgaatgagattgtgcctttataaaagagagctgctttgcctcttctgctagaaggtgccctccgtgaaccagaaagtggagccctcacaagacactgaatctgccagtgccttgatcttggacttcccagactctagaactgtaaggaataagtttctgttgtttaaaagctacctagtttaaggtgttttgttataggtgcccagacaggctaggacaaacgccaataagctttcgtttatgtgggttgtatccattgatacttgctgtatgaagaattaaaattaataactttaaaaagatttattgattcagaaacagtaacaaaacttaatatgcgttaacgtacttttatgttggataaaaactatatcccaccccagtatatgaatagagtggcattgttttatgtgtttaatctctggcttaacagaaggcaattggatgatcatacctgcttctatgtttattctgctgccaatatcacacagcttctggaaacttccacggcacacattcatgagacaataagagttaaaaaggtaaacagtgtcttagtagtgtatgaaaatagtttaatctcatagaccccctgaaaaagctgcagaatccttacgcgttcacaaaccacactttgagaactaaagatcaaggagtacagttttctcatttttatgctgttcagagtgtggttgaagttcagccatcactagtccttcacggatagttcataccccaagttgatggccttgtggaattgctgaygctattttcatatatatatatatataattctagcctttttctctggtcttataagagtcacatacgtaggtaatttcatatcctacaaatatgttctaaacagcagaatattccaggaaaccttaagtgataactgagttgaaagagtcatattttttaagcaatacaatttaaataatttttaaaggaaacatttmtaaaggacgttttacattgcttgcattaaaaagaatataatgaacataatccaactttttstcaatactcagggtcatcactgtgaaagtaacttcattctatgataagataatgatgctcccaggtgggcaaggcagtttttcatctaaggtaattgagacaccttttaaaagcaaaagataaattcacagaccctcagtgtcattataaattacttggtataaagatacttaaatacctacagccttataaggcctaggtgtcaattttttacgcttgcagatcttttacaactgtaagttaaatgattttacacattaagtgcatmtaaaacaaaaagattcaaacccaaatattaatttaatgacatgggtaatattttgctaaaagtaaaccactgctcagaatgtgaataaactgacctcgaaggcctgagtacgtttgaattacggaacacctctctttgacatcacaattgaattttttctttaagtatcgcaaggccccagttcacggaagtaccacaacataaattggtcttcacttggtatgtgaacacatatttatatgttaaatgtgtcttttctttttggtgtacaacagctagagtaatgcagtttgcttgcaatgtgttttttatgtaaatgctgatgccgaatccacttggcagcactgagttacaagaaggttaagtagatgaactagaagatggataaacgaagatagataaaatgaagaaaaacaaaartcaaggagaactcaggcgtccaagagtgtgtaaacaacttctggtgtgagacgcgctacattgcgctaaatggcctgtgcgcttctggtttttcccttcctctgttgattttttatagttgtcttttattttaaacacgcctcccccccccctttttaaactgattttaccatcactctctctagccctgcctccctagaattagctgcttcttacctcccttggatctggaacttaaatattaacgtgtatataagttaatagtaagtagaccgtgaatttagaagagtaaaacagaatcatgagtacgtagtcactgtggccccttttytgctggatttcaagttcgtaagcatttttggaagagagtcgaaggggaaggggtggcttgccagtcagttgagtgatgcgtgagggaggcgttaaatgtgcatgatgcactaaaatgcatgtttcgagatccagtatgactgctcttccatagatgatgaaaccaaggcagagaaataagatgtaactctcttaccttgattagtgatgagaatgggacagctttattyatgaaacccggaaaccactagcccattcttgggatgattgatatctgcaaggatcttcaggaatagagtacctggggctcaggagccaagactagaagtgttgaaaggtgagcaggaattagctgctggcctcagacgtggagagacacacgggtgtatgtgtgcacacacacacacaggcacatgtatattcatgatggcttcttaattcccactccaggccaactcatttccctttcccttccacaggtacttataccataaaaggtatatgaagtgctaaaatacttgtaggtatgttgtcaatatgagctactctgtaaatgataaataataattgactggtgagtctaggcaaggcaagtcaatgagattacaagaaaagagatgttaggccttcagaaagatggaaatttctctttgtccctgcagggactgttgcagagcattagagccaccctcaaacagttacccagtgagtctcctcaaagcaagtggcactgagatacarccttcctacaggttttcaagtcatctcgtgtggtgcacagtcctsgccctacctsgaaggcccgggcraagttttcctgagtgtgtatactcatctctttrtgttrtctctggcagggagcaagtgagtacaggattggagtaataggcatttttaggcttgagatggctttgtgtgtttggttaatgtcactacatttcctaggggatartaaaagtctagcatgataaaagatctcgtcttacaaggtcccgatgtaaagtttggagcctaacttagaatttaaaataaaatacattttgacccattgtattgagagctggtataatttaatatagtgagcccctcggcttctggttggttgggttataaagcytsttattcattcgctcatccattmatgcatttctcctatgaggaagctttttcctttgagctgaacacacaaaattaatcgtgctcgaactctccaaattttgtgagttccctggtaactgactgtatggaagacagaaataaaaatcagaataaacttttattttctgaatcagaaagcagttgctccagcttytggtggtcacattgctaagatgtaaaaaacagaagttaggtgaaataaattaagaataattattttggagaaagagagggtagtgtttgactaaattagaaacattctctgagtcttagaagcgtgaatgatttaaatgaggttccagcatagtattgcatgtggtttctattttagagttttcccacttgaaaacaaactttgaggatttttattgaagtccatcagttttaacttactcaaagcttagcagccaccttttgcttttcttcccgttccccccacctcatgctgtgaagaaagtcatacaccattgtggtgttgattgaaacctttatttctccaggtctcctctcataaactgggctaagaaacacaaaggacatttgacacttcatgactacataagatgtgctgttcctctctctttctgtttgaaagtgacttggcagggtgaagttgagaaccccttggaaaggaggaagccgaaatgcaaacamagttgaatcatgargtgatgtcactctgaaccaattggagcagtggtgtcatgtgcctggcagctacttcaaatgcccacaaaacaggagtamtggtttaagctgtttccctcttcccctcccaccaccaatcagcagcagactgctagaggacagatgcaaaacagttattagaccaggcttagttagacatggaggatgcatcttaacaagttagtacctttttgcaaagcatgaagactaattcaaagtctattttctggttttgctctaccagtayggccaaaaccatttctttttaagtgagaagtggggatatggtcaggtttgattccagttgaagttgtgagctgcacagggctggtctgagcccagtggcatctttccaggtgtcagagccatgattttaagctcctgttaaattcacagtgcttagtaaccataacttcttggtttcatgatcataggggtttttgcatagctgccacccccattttctgtttgtgatccagtagttaaaactcccagaaaatatttctcaccctggtttaaataaacaaaacagccaccacaaaaacaaacaaaaacttggctaaccactattttcaggcatattctgagagagaaagagggggaaaaaaagactagacatcctaaaattaagcaacattatttttggaattgtgttgtttcttatactcagtcatttgtgaatgatgtggttcaaacaaaactgaaacaaaaatagtttttctcattaaaaatatgtttgtcgcatagccagcactcrgaactagggagggtaacatggaagtattgtcattctcggggctgactggttgacagcagcctatacaggagtggagaatattgacagggctgcccgttctccccaggtygaagagagcaaatgcacatccctgtgtgcacggccacctggttcctctcctcacttgctggtgagtattgaacggctcacataattaggcagaactcaggaactttcctccctatctctttcactcttctgaaatgccctttatgttttcctctgctctttcagtcccagtgccttttctctggtgcagcctcatggttcggtctcaccttcagcttttccttccctccaatacatcctgtaaattattgtcagacttcttyttatctaaataactcgtttaggtaaggtactcatatgttcaaaataccatggtggctccctgttctctgtgatgtgaagtcctaaccattagactcagctttcccccaggacaccttggcttatcttcttgctgctttccagaggcatgggccattaggctggttttctgaaggttctgccaaaaggctgggcccttgtctcccaccccactgctgttactcatgtgttctcccacttgctcggcattctttcccatgctttttccttgatcatcactyactagctaacatctattttttcctaaacactctgttgcagttgtagtctgcagtcactctyctaagacttgatcayctattacgctgtttcgttctttattttttaacttttcttcttcttttttttttttgaaacggattctcgctctgtcacccatgctggagtgtactggcacaatctcggctcactgcaacctctgccttccgggttcaagcgattctcctgcctcagcctccctagtagctgggattacaggcacgcgccatcacacctggctaatttttgtatttttagtagaatcggagtttcaccatgttggccaggaggtcaggtcgaactcctgacctcaagtgatccacctgccttgacctcccaaagtgctgggattacaggcatgagccaccatgcccggttgttttgttctttaattttacaaacttggcatagcttagaagaccatatacagtggcaccatatacagtggcaccatattagtggcaccatatacagttttccctgagaaaactggtacctcccaacagataccaaaatctgggaccaccccaacagataccaaaatccacagatgctcaagtcccttttataaaatggtgtgatatttgtgtatagcccatgctcatctttccgtatactttaaaccagggatccccaacccctgggccacagaccagtcccggtccatggcctgttaggaaccaggctgcacagcaggaggtgagtggcaggccaactagcattaactgcatgagctccgcctcctgtcagatcagcagaggtcctagattctcataggagtgagaaccctattgtgaactgaacatgcagggaatctcagtaatgcctgatgatctgaggtggaacagtttcatcccaaaaccatccctctcccccacccatctgtggaaaaattgtcttctacggaaccgatccctggtgccaaaaaggttggggaccactacgttagaccatctgtagattacttataacacctaatacaatgtaaatagttgttatcatgtattattagggaataatgacaaggagaaaagtccatacatgtttaatacacaagcatcctattttttttcctgaatatttttgatctgcagttggttgaatccatgggtgtggagccctcagatatggagggcatgctatactgatcacccctatgggtgtgaatgttgggcagatcctccagtgtcaccagccatgtggccttggtgacctttccatacttttcaatcagaatgatgatctccacctctcaggaaagttgtggggatgaaatggtatagtctgtgtgtgtagagttgttaggctggggcctgccatgttaaatgcccatgaagcaggtaattatggtagtagtggttgatatcttgaaatcagggggattcccaaatttctaccccaaatctggatgactgcatattgcgggagttcagtaaatatttgttgcactaatacttatgtgcatacgytgaaataatctaaatatttaaaaaccaaactaacggtaggactttcctcagggatttaacgtttgctgtagaagactgaatgatagaatatataagctgtatttttcttgtgattctacacattgyccatgttgcaacttaaatatttttggaatgcaatgtaaaagtgatttactgtcctataattgttttcctgaaagcaaaatgatatttaagtgaactgcaatgaaaaatgcaacgactgtaatttatcrttgaagggcattttcaaagtgtatagaatgactaaagcttaagtgtattaaatattctagaggaagacatatttaggctataaatctagacttcctttggaatttgtttcctttttctcagccaggtgtatgaagattttaagttcttaggcctcagtgggaagaagatttaaggttcyaagagtacatttgtatctcttttaaattttctattgtttatcagtgacatatgtaaatgttttagggagctgtttactgtaacattacctactttagctctgtgcagttgtctggcaaccaatgtgataaagacagaggraagtgctgtattttgttgctgacaagtatatcttaaaagtgcaggtgcacctgaataggcartaaagtattaagagctgctcctggagcagtttgctctctgtgacgtgtgaaaagtctacggggtttataattggtctggccatacggctgcctaggattagactcttttcatatccyactaaacactctccttagaagcaagcacaaggagatagtttattttaaaatgtaattgctatgttactaagatttgaatttgagtaccgagaataaaccatatttctgtttagaggctggttggcttaaaattgtgtctaatccttcccctgccccccaactccgaatcagagaatgaataacaaataaacatgacaatgaagtctcatgctgttgttttcatatttgtatttaggagtttcagagcaaatgacttggaaaacaggcaaatccactgacataggcatttttagccaccttggaatccgaggagggattctgcactatgccctgtaacctcgtycacatgccgtttgaatgtataccatgaagaccccttagctcagggagctttgctctatttaagtaatgtttatattcttaatgaaccaaagaggaagtggtyatgggaaaagagccaggactagatttcattctaatgcttataaggagagttctaggaaaccctcagacttggtaaaccaaggcatttggagatactatgaattggtttaaaaggccatttaccacttcttttgtaattggccttttaaaccaactctcacttagctgattaaatgtggtcatttaaactgctagttaacaatcggaagtgcagtggcgcaatctcagctcactgcaacctctgccttccgggttcaagcgattctcctgcctcagcctcctgagtagctgggattacatgcgcacrccaccacacccggctaatttttgtatttttagtagagatggggtttcaccatgttggttaggctggtctcaaactcctgacgtcatgatccacctgcctcggcctcccaaagtgctgggattacaggcatgagccaccgcgcccggcctaagatttcttattgtggtattctgcagtggagaatgggagttggaaagaaatgttttctcccacacctgtcccgctcctgtctactgaaagctgattaatcagtcagatagtgagttcctattggtagtamgcctccaaaatttggaagaggggaggtggcgtgatgtgaaaaagcaaggctttagggagagattcccgctgggggcattcaccctctggtccagcgtgcctgttacagtgatcactccatagtggttttgcatgaacaagactgcccagtttgcttaggaagaaaacaaaggacataagktagttctcatgtcttcccagcaccctaaatactcgggctaaacttccacagtcagaccgtcagcttcaggaagggctgctgttgggaactttttttttagtttgcagttagttcagctccagccaaaaacctacaaaaagccactgcaagccctctgcctgctcgtataagacaccttggttgggcccctgtgactgtccatccataggatggttggccattgactgcacagagaggtagggcaagataaaacgactcatttgtggatctgactccttgtacttctgtttggattcaaacagaggaagatagagtagtggccttgggaaaccgtggagagagaaaaggcatagtcagaatgttttcagaggagcgcagacttttcaaaacccctctcatcacgttcccactgaccttcagttccagtgctgtggccacagggtgtctgcaccccaacttctttgccaagaaattaatgatctgtgaagacacacagacatgaggcggacttactatttaaaggaatcctgaaacgaatatttttctgatacatatttatcctaatatatttgctgagcatggtttttttttttttttttttcctattttggagtttttgggttttttaagcctagggaatgcctaatatgtactgtggagtgcatttgttcatttatatcccagtgcattgtaaaatcgagcaattcagtgccttagaatcctttctgtgaacttgatgctacgtgaactacttgagaacaactactttcaagccctccgaagcactcagttacaactgtcggtctaattgcacattattctaattcattaaaaaagtccccaagggcttcttaggatactgctctatgttattagaagtccttccaaatagaaaaactttattaatttaaaaataaccgccaattcagacttcgattcaaacaaggcattttaccaagtccggctgaaagagcttcttaccacatctggcatgtagaatggcagaagactatttttgctagattccttgttgctgcagccrtttctgatgtccttttccccttcacacctttcgtgttacacatgtctgagatgacatgatgctaagtaaccaaagtactgctgcgatggaattgctctgatgtttttttccagagtgaaagctgctattactttaaaaaaaaaaaaacttgaggtttggtttctttccccctctatccgggtgttatacaaatatgtaattaagatgtttgggggttcagatgacaaacaaggagtctacttctaagaatgcatttgcaagccaaaagagtggtgaaccacttcagagtgcgggtctgtgggggatgatgtctgctttgcttcgttttktggaataatttttaacatttctatttagcattcatgatactctaaatagaagcaggagaacactgtggctctcggatccaggagaggcaggccacgagggctcctgctgtttggggacagtctgtaactctaaatctttttatatgcagcaattatgaccttaaaaatgggtgactctaatactggcattcattgcctaaaaataattttaatgtgcaaatgccagagaccaggtcatctcagaaatggactagaattgaccactgctatgttttggtgaaacctgataaccttgcttttctccgtgtaccttgtttttcattgtaaaactatttaattatgaaaatgagagtgtgaaaggcaaagtatrattgaatttagggggcagttccatatagttgtaacaaactgattatcaaatgtccaccattagtatgttaaaatacggttttctaatactgagacaacagggatggagcagcctatccactgaagtcttgttgtttgtccctgctgtgtcccaacctggaatctctttcttcttccttcagcagacccttcgagatcagcttaagcttcactgccttagagaaactttcctgtctacctggactgtcttctagatttctagagcagtgttcctgcccttttcctttctaaatggggtgggagttctcagagaactcatctcctttatggctttatccatcacagccacacagataggttctgtctggaccatccttttccctgagctttcttctcctttgccatgtgttttcatttctgccagacactggcactggggaagcctcccatcgtctcagactcagggtgtgtgaaaaacaaacctgctttctggactctacagtttgtgcactagcctaagccgaaaatcttgaaatctgtcatcagtgactattgtagtccataggaatacccaagactgggtaatttataaagaaaagagggttagcttttttttttccggctcatggttcttcaggctgttcaagcatggttccaacatctgatcatcatctttttttttttttttttagayggagtctcattctgtcacccaggctggagtacagtggcgccatcttggctcactgcaacctcccacttctgggttcaagcaattctcctgcgtcagcctcccaagtagctaggattacaggtgtgcgccaccacacccagctaatttttgtatttttagtaaagatggggttttgccatgttggccaggctgatcttgaactcctgacctcaggtgatccccccaccctggcttcccaaagtgctgggattacaggtgtgaaccaccacgcccggccaggatctgatcattttctaggaggcctcagggagcttttaytcatggcagaaggtgaagggggagcagttgtatcatggcaagaagagaaagagagacgccagatctcctggtagataactaacagagtgagaactcactctttactgtggggagggcaccaagcccttcataagggatccaccccatgacccaaacacctcccaccaggccccacctccaacaatgggaatcacatttcaacatgagatttggagggaacaaacattcaaactatatctacgaccaaattttcctaattcctttctacttaaatgctttcttttccatttatttcacccacatctgaccctaggatttcaacgtgttctaaaatgaatttcttgcacccattttcactttctctccaccagaatccatctcaccacccacctgccagtggcatactccttgcatagaccctgctctagcatgaatatagcccactgttatctgttgtagaacctcacgcccagcttcccaccctgtgtgacatcttcaccctcttgccctggcttgtgccatccacattccgatcttgatgactctggttctcttctctttgacggtggagggttgatcccttccttccccatgatcataaaaggtcatgccaacactcctaaaacaaaagatagattaataagagaaaaacctaacaaatttattatatgtgtgcatgggagtcatacaaaatatgaaaactcaagaaaatggccagatggttgatccttaaatgctttatttattggtgagaaggtattgggggtgtaggagtaaatgattttcagggaaaatgaatatttccctgagacagcaatttacttgtaaatgatgctctttagaatttgaacacgctccagaggcagaaattgtcttgtgaaaaagtctgtctgggtatggttgcattcctcagtcttgagctggtggatggcagggtgcaattgcaggccgtagtgttcctctttggggatctggtttctaggtgggtaagggaacttcagagaacagccttgtcctgtgctttgcgagagacaaaggatgaggaaggggggtcagggaccttgaggctgcttcagcatgtcaagagtgccatgtttgggacgcctcaacactggaaatagccttcattcctctgcttcttgggtctggatccttttctttagactccaagaaattcttccttttgccccaaactcacattgtttttgtcttctgtccctctacttctatgtaattctattattatgcacagattctgtgtgcccaaggagactgtaaactccaggagggcaggaattatgtcttaaaacactagcggttaaacagttaagaggtgtcttaaaacattcctgtagccccagctacactcttgggtgcaggaatcacaagtgccttattccccacagggtccccagcatattccaggagctcattatgtttttaaatgaatgacctactgaaggcaagagaccaggaaggaaagtttgtaaaagtttacattattagattacccctgagatgtgtaaccttctcacgagttagatttcttgaaccactgcccgggtattgtattcctactctaggagcttgaaggattaatgataatccttttacagatatattcacaagtttctgtgaatgtgaattaagtatgtagatcttgattgcctttcttgagtgcatggtttttttctagaaaaacaaatttaagttaggtgggacacctaataaagctctaggctcctttcttttcctcttttaagacacagttaattaccttatgctaagttggaatataggaattatcttccaaaactgtgtttgcttgctgtgtctacataaaaattgatacaaggtatgccatggtttatacaatttctggcacatttacctggtctctgttacaggtttgtgaaaccaatttttttattgtaaatagtacgttaccagcttaattgctttagaacctagacagtctatgtctgtgatagtaattacattctttcatgactttgtttggtaacctgaatgttgaactagctctacagatttaggtcatgtctgatgctagccattcctaggaaaaagtggtgaggactacattatgggcctttccccctagacttaaaactgtgaagaagtcattttgggttgaggtatcccctggtaccctctcctgaacttcaatagaataacatgatgtggtgaatgaaccatattagaaaaaccagccaatcagccragattcttgtattgactcttctgatctccctctacctctcctttccccatctgccaaacaaagggtttggaacagttaaattctaaagtggtgtcattgatggctctcagtattctgtggactttcctggttgattcagtacttgtgattgacctggaccccctggtttggtccagccttagagcgggtttgcaggtagacaccttcctaatgtttgttccacgtaagcccccggagcacagtatttccatcagctattttgtrgaagtgagcgattctcttttggttgtaaaccttcactatttcatgtgggtgacttgacaatggctccatttttgaatggcccattgatagttgtagtctaaaaatttccagagattacacaagggtttatttaaagggaatgggaatagggagaaggtataacctttccaaaacaatctttaaggcaattataagctgttaggaaatgtcatgtaataataacacagatacccaagcttatatcacataaatcattcattttgcatgtttttgacagggagatttattttccaggttaaaaacaaaaaagaaaaatcttaaaagcttaagcttttattgtttgctttttttattaaaaagtaatttggagccagtaacttaacctgtttttcataaacatgctatctagaggcagccaaaaaaatattcatgcttgcatagtcagggtcctcaaatgaacttatgtgttggatcatgataactctggtaattactcgaattacccttgttgagtaatagtatggaccctgaatacaagggtttgatttatgtggccagctctgtgctgctgggtttatgaggacttgccagatgtcatctcctaattaaaatccttctttacccttaatatcctctcctctgtccccaagaaattaatccattctattgctggagcatgtaacagctgatgttgaagttacaagtttacagcttgaactttgcctagactgtaccttttttgggaaagagtttgcaaagcttttaagcctgactcttgtctttagatcaccagcatcaccatggtgcctggcatcagtggagcctcagcaagtgtttatggtggaaacctcagaagctgtcactttctctggctgtaacagttgtcatctttgtttacagggaaaatgctcttgagaaaatggaggtcattaaacactccagcttcagcaatatcatcagagctttccgtcacgtgagttatctcacmaaagggtcagattctggtaaaaactcttgccttcacacttacttctgttttattttgccttatttgacatttcaccagaattgatccataggttcaataaggctccattctgttgggacaaatcaagctagaaagacactgaactctgggggttaccagaaatatctgaaagcaaagcagtgactgtgaggtgggaatctctctgagaatcctttgcagaaccatgtaacagctctgcatcactagacgagccaagcgaagtggtcctggatggttcagtaggctcaagcattgagggtccagagcatcctttgcccctggacatggaagggttttcattgggagatggcatttagggcatccttataaacgagcaggagtaaacctagcaataaaaaccaaacctctgccttcagaggtatatgctattacttctgcttaaaccgttgtcagagctaacagttttggttagggatttttgtgggtccagggcacgcccagacacccagatgcttctctatgtttgtaagatggcgagtgttgagatgtcttataggcttatattgagtgaaaaggaataggatcctttgtcagtagtaacttaggctttttaggtggccagggcaagagaacaccccccctacacacacacacacacacacacacacacacccctacacccacacacacccacccctacacccacacacacccacccctacacccacacaccttcccacacaaacctacacccacacaccttcccacacagacctacacccacacaccaggatttgaaggctctgctaagaggctacaacaactgtagcatacaactagcacacttgttgctattatgtgtaggggactagatggaaagagtgcagataggactacctaccattcacccctaccagcgaagtggaagcactcatcttctttcccttcttaccytttcaaagcaagttgttgagggatgaagaggagagtgactttaatcgtggctttaagtagagattttctttaggagtaattgtttctctcgacagagtggataggcttccatagttgtcttaataccttttgtccaccccaaggattgacccaggcaaggaggatgaaccctcctcaatttgggaaagttaaattttaggcacagcaggtcaaagagtagggaagagctgcagttgttggaaccaagtgacattgatttagtctggaaaggagtcacagaggaatcaaaagccagaccctcctggcagctttagatgtggttggggtctgggaataatgctggtcccaaaatcacctctggaactaactcctgtaaaatgaagcctctgcatccttcagtaacttacttaaaattttgttagggctgcattttcttcaaagccaagttctgaataagaagtatttgttttggrctctagccagattactgaagtattgttgagggagatttgctgtggaaggkgttgggggtacagggattgtgaagataatgtaaaatatttaacattttaaaaattttcagtaagttctctttccccaatgtcagcatgacttcttcattcatgttcttccatcactctccattcagttagaatctcaattgtgtaatatcagtggtagcgacaattatgaaattcgtccagtgaggaaaatccgcagagctagagcccaaaccagcaactttgtagtgaggatgaccccactggccggggagaaactgaactgatttttttttttctctctctctcagctttttattttgaaataattttagacttacaaaaaagttgaaaaagcatccaggcatggtggcttatacctataatcccagtgctctgggaaaccaagacaaatctcttaaagccaggagtttgagaccaagctgtgagactatctctacaaaaaaaaagaaattaagtagccagcagtggtggcacgtggctgtagtctcagctacttgggaggctgaggtgggaggatcgcatgagccaggagttccaggctgcagtgaactatgatcatgccactgcacaacagtcttggagacagattaagaccctgtctctttaaaaaaaaaaaaaaaaaaagtttgtaaaatatcacccagttttccctaacgttagcattttacataatctatacaccaattctcacagccaagaaattaacaatgacacaatactgttaaccatggactatttgaatttcaccagttttcccactaatatcctttttcagtcccaacatccttcattgtgtttacttactatatctagtcttctccagtctgtaaaaatgtgtctatctttgcttgtttttcatgaccttgatatttttgaakagtatggacaggttgttgcatagaatgctccaaattggttctaatgtttctcatcattaaactcatttttatacattttggggaagactactacaagattgacattgcatctcagtgcgtcacatctgtgtgatgtcagcatcttaccactgatgatctcttagccttgaacacttgattgaggtggtgcctgccaggtttctccagtgtaaattttctgcttttcgcattgttactgatatcttagggctgatactcacagtatgyagatgtctcgtttctcttttttcatatttcttttcttttttctttttttgagacagtcttgctctgttgcccaggcaggggagtgcagcctcagacttctgggtttgagcaatcctcccatctcagtttcccaagtagctagtgtgcaccatcactaattagtgccccaccagttttgtttgtttgtttttttgtttgggcagaatctcgctcagtcgccagactggagtgcagtggcgcaatctcggctcactgcaacctccaactccctggttcaagcagttctcctgcctcagcctcctcccaagtagctgggattacaggcaggcaccaccacacccagctaatttttgtatttttagtagagacggggtttcacatgttggccaggttggtcttgatctcctgaccgcccacctcggcctcccagagtgctgggattacaggcatgagctaccatgcctggccttcaccaatttttaaattttttgtagaaactcactatgttgcccagtctggtctcgaactcctggcctcccacctcagcctcccaaccacaactggccraggtcctgtttctcatcacattgtcactcactgatcttgtcatgctttggtggagcttatctacaataattattactgccatgctttaatggcaattttctatcttattgtcatttattcattggaatttttacataggaaagacctgctccttctcaaactctaaacagtttcattcaccatacttttctccaggtaactttctgggtggctgaaagtgactttcaaagaatggagatatcttttcaatgttgagagagtggcagtctgctggttcccaagatgccttcttcacctagcattgagactctgcagaatgccttgaccacagttgtgatttggatctgttggcttgcaaagcccatttgagaatttacaaaatcattttcacggcctgagagtcttttaggtactgatttttttcatcccttctttactaacagactttatttagtagagtattattggacaggtttggggttcacctttatgagaaaaaacttagattttctaatttcagcttttttattttcttccatcagtgggacaaagttgacatcattgcctaaaagtaatttctgtgattatctgtgtatttcagttaaccatgttctttggactcactgtggtcttcagcagggatggtggccaaactatgtttagaaagataaaaattaaaatgacatctgcatccttcatgtaaacccataaaaaatagcacgtgaccctgaagatcctctgcctctcattccaggcattacaattgaaaatgctatctgggatgttaaaaactaaaactattctaggacttagtggaatattgatagttagggaatgctgtttgctttcttgaattttgaacctgttattgagaaggtagatgcgcctgtttaccccaggaaggctcctctttgaagacagtgcccctggagcacatgaccttttcatgcccttgcctgtcaagacttttccagtactctaaggtcaaagggcgttgggccaggctgatctaatcagggtattaaccttgccccactcatcttgatttattcctagatcccagttcccagagcatccctttagagcctcagaaatggaacamaagacagctgaaataagcccgtggccaaaaggcactctgagcatgagggaagtaagcaggcttccctgtcactgctgaggctctgtcatccagccccagctgtcctcttgtgatcactcagcagacccgggaaaaattcaagaatttgttttttagtgtcagtgggagacgtggggatcctgcttttgctgggagagcttcagttgtctgagtccccactcaaccccaggctcctgccaaggccaccaagggcaggagcactggaaggctgactatggagtgaagaggccactgggtttcacaaacagcactgtcagccaaagctgtagcttgttagccatccaaaagaatcttgcacctgctgccagtgagcttacacctagatgacagctggagctgacactcattcagcccttactctatgccaggtactattctaaacacttgccatatactcagttgtcccacagatacaactatttatccccactttagagacaaaaaattgaggcacagaaaggttaagtaatttggccaaggaagtgcagctagtaaatggcagacctggggtttgaaccgaaatcagtgtgactctagagtacctactcttagaccctactctctactgcctctcattagaagtctcccccacctccctaccaccaccatcaccacccaccctcccagccacatatatgctcacactgggtggttcagatggctagaagtggcagctcaaccttgtgtgcctcggacacgaaaatattaggttcagacaccactcagacttcacattttcattagttttgggtagaggaatgagaataaatattcagcgagacagccttttctaactgcaagattgcattcctcttctttctagatgcagtggcaagaacagtaccctggatggtggagctggtagtggtagatgagatagagcagtcccttgattctgctttgtccccattaatgacagatctgagggcatccagaaggaatctccacaagcccagcctccacagtggctgcttccyctacatggtagagtggtgctcacctccactcctccatagatgccaagtcatctgtggtatagatgtggatgtctttgttcaaatggtccttgagtctttgctcagatgatccttggttcttcatttcacctgggaaagaaaataatttgcctgttgtcattttatccataatattaagaaaacttaatggcacaatctaagctttttaccatgttatttatcatgggattacttttttcaggtgtcttctgaacacgcagttgtcccaccaaactttgacactgcccttgtgattaatttttgcctacattaatcactctcccttgttttaattgcacattacattcttttctgtccttcccggacatctttgctagcacagtgagtgcagggaggactgtcacggactctctcccctcttgaatgggggcattccagcagagtgtgttacatgagctcagagcacatgatgtgagagcctcgtgatgaaagatactgcaaaaacagtgcgcactgttatcaaacctgactgccttcacatcttgctttctgtggtgcaaaataaggtttttatagtgtcctgtttcttctgttatcatctaaaccaatggggaacggtgagtaagtagtaatcttcagaaaagaagaaaagacagggaggagaaagtgtactggaggcctgctttaccattaagttgttaagatggagtctcactctgtcaccccggctggagcgcagtagtgcagtcgtggctcactgcaacctccaactcctgggttcatgcagtcctcctgcctcagcctcccaagtggctggggactacaggtgtatgccaccacaactggctaattatttatagagatggggtctcattttgttgtccaggcggggtttttgttttttgttttgttttttttttttttttgaggtggagtcttgctctgtcaccgaggttggagtgcagtggtgcaatctcagctcactgcagcctctccctcccaggttccagcaattctcctgcctcaacctcccgagtagactagctgggattacagctgcgtgccaccacgcctggctaacttttgtatttttagtagagacggggtttcaccatgttggccaggctggtctcaaactcctgacctcaggtgatccgcccgcctcggcctcccaaagtgctgggattacaggcgtgagacactgcgcctggccgtccaggctggtcttgacttcctttcgcttgtagcctcccgaagtgctggaattacaggcgtgagccaccgcatctggtctctaagttttttttgaaagtgtgtgtgtatgtgttgaaaaacaatcttactgccatcatattgaagttacctagtgcatttcttcttcagggtacgaagaaaaaagaaaagtatgtcctgtggttgatagaaatcagtaaaatggagccctgtacgaggaagtgctgatgagactccaactaactccatggagatgagctacaaaaaaaaatactgattgggttcaaatccttggcctgccatttactggctgtgcttccttggtcaaattacttaacctctctatgcctcaatgttctcatctctaaagtatggaaaataattgcatctgtgtgaaaactgagttactatacgtaaagtttttagratagtacctgacatacagtaagtgytgaataagtatcagctagagagagagagagttagtttccagcagcctgtttctgtttggggtcacatgtggtctctgtccacctggctttttaggcctctcttacctgttccctgtttatccttgcctgccccagggaggagtttgagttggtacatcctgactgggtactctgcctgtggttagcaaatactctgcatgttgagtgctttcaaaatacagaaacaarcaacttgtggaggcattggaaaagtgtgtttgagaaacaagcagcctcaccatgartgggagtttgtttccctttctcgtctttctggtcatctgctgcacgggcaggaggagctgtgggttgcttttcttccttggaacatggagcaccactctcccctgtgctgatacacttacaaagaagttcacctactccttggaaagttctggaaaaggggcttctacactgttggcctctcgaggagaacggtttttgtttctgtcttcctggaaaagaggtgactgctggcatcatctttctagataaactscttgctatgatgccattagaagcagtgttcttttgtgttttgcttttgtttttccctgtagacaggaataacattttgactagaaacttccctgatgtaataacgaagatggcctccttagaaagttccagaacagaccccttcacctctgtccccagaagcagaagtaggtgatgcactttcttggcaagccacataactaccatttctctacaatcgaagctcaaaaatctgtgcttgtatacgttcattttttgtttttacttctttacttcctttgataagacagaaacttctgtattaaaactgatttaactctgaggggctaagtgaacaacaatctgttgtcctatagaggtcaaggcagtgctcacaacaggatcattgtgctgctgtagttcagtttaggggacggggaatgtttataaaaacaaagttttgaaatgaggacagggaaaggctttgtttacctggggctctagacttaaggtactcattttgcctgcagaataatgaaatgcagagttgtaattagaaaaggttgatgtaattgatgtgttaacaatttttgaggtttttctctttccactttaggacagtcatgcaattatttttctgaaccaaaatcagaaccatcagtcgaaggctaaaacaggcctggggaaacactgtcttttggcaaagaaagacaaagatccttgttctctaggccagtgtgcatatgtgtgtaatgctttaaagaacaattttgacaagaactcttaggatgcaacttgtagagtgatttttaaggagatgcagtaggatttgtgcaagtattctgctatgagcctaagattttcaacatggaaatctagccatgcagtgactcgttcactttggcagtgtctatcttagtctgggggtgagcgtttgtagaaaatatttagagactcaagtacactcatttgaatttttgctgttagcaaataaatggcaatatgtgtaacgtggtgaatgggatgtaaagctgtctttatattaccacggttagaatttaattttgaaagttgcaagtcaaactgcttcctcttgcgtcattaagttgtgcctcttgtttgctcaccggcatgtgtgtccttgtgtcattttggttgctgtgaaattgctcttaccattctttcatccttcaacctgctgtgctacaatcctaacatgctgtttttgttgaaaatgcattcactctttttggcatcttttttccccagaaagttagaatattgggaattcattggtattagtgaaattcccacctaatgcagcagtttttttctcttacctgcataatagacgcagaacaaattaactctaaacggattagagctgtcaactgacagatactgtgcgagatactgaggaagcctcagagatgataccaataaacaggacagggccttctggtcgtgtttctacttctcttattggtttgtcttagcaattttgaattgcactgaaaacgaaatttcataggtacacgatacagtagttagttttaaaagtttttaaaatattaaaaaattgaaagtatttaaaatattttwaaaatattttaaaatctgctgtgtgagatagataggagacctagcttttcttccttcttaccttgatccatagagaaagcaaccctgaaagaagaaaaactcacccatttgagctttcttttgtttccactgagcaatacggaagaaattcaccrctggttataggtcttcagtgctttcttcagagtgggattgttttttgtttcaccataagtagtagtctattaaattaacagttgctagagaagaagctgcatctatatatgcagttctcttcttgtcaagcagtatattttcacgatagcaatgaaaaaattccatcctcaccagccgctgaaacatagtaatactgcagaaattcctgtgaactatgcgtttgctgcttccttttgtttgtttgttttcagagcagatgggcttgtttgctttttgcttaaacattaatcaaaaatcaatttatggctatgtaagtggcattagataattctcattctgactacagtaaataatatctatttgttcatgttagataagtctgggcggcagtggaatgtaaaatagaattacatgagatatgacatatggctatgtgttttataaattaatgcttttatgcatgtgggaggagaagtaatttagcttactgacaaaaagaaaagcaaaggaaattccagagaaagaacaggataccaagtctaaataaatttggaagacaaagagaatatcatartttagttcaatcttttaaacaaattgtcacaatttatacgttgggataagagaaccatgagaaaaggtatattctaagtcctgaacatctttctataccctgaagatgtttttatagctcttctgctgactccctgccaaaaaaactatttacggtttggggtagggggcgtgtcatgccatacagctaaatacacttttttcctaatctaggaggcatgtctacttacaaataaattgcttaaactagttaggcttgtgtaaatgtaactgacatttccttgagatcagaaaaagttttgctgattaactatatttgtgtgtgtgtgtgtgtgtgtgtatttagagagaaggagggattttataattattacaatttgatttgaaatgtctagagaaagtgagagattatggaaattaccataaatgctccctttttcatagatttagatctgttaattgcaagmaatctttttttaagtgaatcaatgggaactttttatttcttccctaagattcatttagccttgaaaaggccaaaagttgaatgaagcttctaaatgccaatctttccctccttctgttaaagagtatgcttcaactataattacatttgcattgtttaaaatattagtaattctacagccagacctctgagatagctgagaaaccaaaaagtgaagttcaaagacatcatcaggcaccctctccacacacaacataccaggcccaccaaggagtttacatgagtgtttttgccttgttagccgtggaacgacctgggcagtacccaaaacttagcaaactcttcttgtaccttgtattcagtagacggtcagtagcaccgagagtagggagaagagtaaatatgtttctaatactttattcaatgtatgttgttaacagtgtagacactctgactttccttgtgaattgcgcctcagtatttagttttcatttaccctggatcagatagggcatgataacctttgaggggctttgtgcatatgtaatttggaatctgagtcagtcgggctgtgtctctcccaacttcccttctcatattcttctctctcctcctcctcccctccctcctcctcgcctccctcctcctccccctccctcttcctcccctccctcctcctcctcccctccttccttctcctgccccctcctcctccctcctcctccttccttctcctcctccctcctcctccttcctcctccccctccttcctcctcctccccctcctctctcctcttctctcgtttctcttctctctcttctttctctcttctctctctaccattgctgtcagttgagatgggcctgtgcggcactttgtttgcagttgattggcaatcttctgttctactactgcatctgaatcatcacttgcttccaccagttctctgaatgtcttacctagtgatcctggtggggaaattacagtgattagtgttccaattcttgtttgcccataagtgtttcaaagtagtatttttaaaaactcttctaagacattctctcttctcatagtagatgcagtgaatcttaaaggtgccctaactaaaatttttgtgctataaaattggcagctttacaaaataaaaggttcgagatatgagcctgatcaaggctctgcatttgcaacaatatccttggtttgcctggccctgttatattttgctgttgtgatatgactcctgccagtgctatttccatttaacctttgtttttctaaaagacagtaataatttttcatttctagggagtctctgacatcagctaaaggaaagacacttttctttgactgtatatacatttctccccatttcattaatatcaaagttgctctttcaaatggcttataaaattttaaaattacaccagttgcataagcctgcataaaaagcagactcctacataagctgacaatgcatttgtaccgtggtgttgagcagttttaacatcctccgtgcctctgtgcttctgctagctactgctctgataaagttatcaaggtatcattggatgcattgaccaggatgaagacacaacagtatggccttattaaatttggaaataatgaacagacgagtagagaatttaggagcaatataggcaagcttaataggtctttactttggggcctgtaactccaactacatatggaagaatttaagtacaggaaaagttaagctcttttcccagtagttctgctgacaagttgggtgacttcgggatggttacctcttcatgataccacacggtgatggtaacagaggcactgtccagtctctggttcatgcacactggtcttctcaggggtccctgtataggtgacacagtggagaacagggcagtactgccagactcagggacccagttcatcgagaggggcagtgtttctcttatgctgccttaaaggcattggatgccttttggaaagccagtggacarctcctgcatccacccaagattaatgttaacagcttaaagaatcattgcaatcaagggaaattttgcaacactttgttgggatatttttaaataaatgtgtgaacaccttgttttaggcttgctgaaaatgacccaggaattccttgacccgggaatatagtgtatggctgccaattattatattccttcatcagacaaaggcggaacagttcactctttttcttttttttggacacaaattctcactccctcacccaggtcagagtgcagtagcatgatctcggctcactgcaacctctacctcctgggttcaagtgattctcatccctcagtttcccaagtagctgggatttcaggcrcgtaccaccatgcctggctattatttgcatttttagtaaagacagggttttaccatgttggctaggctggtctcgaactcctgacctcaagtgatccttctgccttggactcccaaagtgctgggattaaggtatgagccaccttgcccggctaccggacagtccactctttacaggggggcgtcttggtataagtatggaaagctccgtagatgccrtgtcagtccataccctcaccaccttcttgaccctgtgccgataaactaagagatgtgggcagtgtaccatctggaaaggaaaaggctttggagccaggtagtcctgcctgcatttgaatctgctttctaccacttacttacatcaggttttccttgtctataaaatggaagtccttgtacccaccacctagaatggaagtgaggattaatccagaccaacgatgaagagtccagcatgcaggaaatgctcgtttataaccatggaagtttcgaggacttttgaaattcgatgacattaacctttgaggtgcattttagttggcttgtgtgatgaggcctttctacttctagttccagaatcgtctggatctacattatgtgggaatgtttattcccccctttactttcccaaaatttgctaaacattttcattgctatttgagttttttaggagacatactgagatgaagttagggatgtgaaaggtttactgaggataacaccaatgaaaggaagagaggaggaagatgatgggtgtggggagcggtttgaccaggactctgataggacagacactctgccagccctccgggagctcatttgcagagccccctgttagatggatataaccgggccctgggaccattgctgggctcagttactggccaggagctgcctaggaagagtgtgacctaggccaaaagttgaagtggaccctagaagagctagcagctggagggcatctgctagtgacactctggagctggacagcaagtcctttctgaaagaggatctgagctgagtatccctgtggtccagtatttcaagttggaacctctaggtttgaaaaatacatgttttgggtgagagtttgattattcttaaagggacatatctttcaaacatatggctgtggaagaggaaacttgtttttgacttgtaaaataccagcagagccttgcagtgatcacaacttatgtgaaatacagaccatcacccacagtttacgtgttcacactaaagtgccagtctctctatgggttttagagctgatttagatacatgcattgctaatacagtcagcccagccaagatagtgccatcctccgcaagcatccahtaaggcatggagtcagcttccgtcattgttagatcagtacttgtttctttsccttgcttatttttcctaacctctctgaacctgctgtgttggaagcttaaggaacatcatcctctgttgggcagaattcttccatggccaccccagcattatgccccacaccatttgacttactcatttgtgaatgccaactcaraatgtattgctttgattcttgattaggatctcaacctctatttattgttaagactatcaccctttgattcccccccatcccattgtgtccttctaaaggcacagaatagaacatcttctgccagaaataacatacaaatttatcatcatacaactgtacaatatgcaaataacttgctagatgatattactgaagattctacatccaattaaaataaaragagaaaacaccttaagataaccatactattaaaagatacagaagacaactggaataaatggaaagacataccacatttattagacaggaataatcatcattagcaagatggcaagatgtcagttctccgtaagtttttcaatttaatataaatccaaatacaacagatttttttcttttagttagattctgaggttatcattaaaacaaaaacaaacaaacaaaaaactgaacaagagcaaggagtccttaccaggtattaaaaacttccatagtgcctaaataattaaaatagtgagataccaatagatgaagagacagaccaatggaacagaatagaaagtccaaatgtagatgcaagtacctgtggaaatttagttattcgataaaggtagcttcacaaatcattgggactaagataaactcttgatttactggattggggcatgtaaattatggcccaatcatgccatgtttcttttctctggaaaagaaagtaaattaggttcatacattataccatgtaccaggctagactccaagtgaatccaaggtaaaagtgtaaacaaaactatgaaagtcctggaagaacacatagcgagttcctttttataaccttggagcagagaaagcctttctagtttcaactcaaaatccagaagccagaaaagaaaacattcataaaaattgaatttaaattacaaaaaaactttctgcatggccaaaaaccataagcaaagacagatgccaaactgagaaaaatatctgaaacttctatcacaaagagctaatctcccttgtttaaaaaaacaaagtaaaacagagctcctagaaattgttaaggaagaggctaacagttcaataggatttgggatgaagtattgaacagatagctcacagaagaagaaacacaaatagctaagcatagaaaaaaagtttgatttcactcatacgagaaatgcaaattaaaactacaccaagataccattttttcacttctcatattggaaaaaatccaaaatatttgataacacactctttggaaaacaaccccacatggctgggaggacggcagaatagcacatctatagaggagaatttggcaatatctctcaggttataaacacgtattctttgacccaccaatcttagagggggcatttaccccatagacttgcacacatgtgaaatgacagttgtgcagttgttcattgtagtgtttcaaatggcaaaagatgaaaatgtcccccaaattccatcactgagggaataagtaagttagggtgatagctcccaagcttattttctcttcagaatcacctcatgaagaaaatgaaggtctgtgkgatagtagctggcaggtgggcatggtggtgagggtggtgtttgagcggagacctgaatgaaggttgagaaggagccagccactcacagacacagaggaggccttcaggctgagagagcagagaaggaccctgtggcagagacaagctggaaacagcactgcttccatggtctggagactggaatatgtgggttctgcagacacctggggggggcaccacctggtaaatctgcctttcagctcttggttcttccagcaaaccatgccagctgtggctctgtagccatgtcctcggaagatggcagaggttgcaacgaggcctctctgaggtgctctgggagcacagaggagtcaggtggaacttgtggcatgttgccaagggaagaagtgatttttagacagaataggaatttgccaagaagagaagtcagaaaagcataactggcagaggaagcagcatacgttacaagtaactgcatgtgtacagggaatcactgagtgatggacaagggcttggcacttggtgggggggggtaccatgttaacatgttagcaagaaactaggtaggggtacttgacttgggggcagcagaagcaggtgtgagtgttggacaagacgagaactgagtgctgcaaatgtttggcaagacttgattgagtgcatattgtggacctgtgtctccactggagacacaaattagaatataacaccttgccctggtatgctcagggtctactgaggtggagaaacctgcaagtagagtcggagtacagtgttgaaaacaccatctgcaaccttaacacagtgctaccaaaaccgatttcggagcactcctgcaggaagtgggctggccagggcaagggaagccgtggagaacagtggcctctcccgggcaggcagggtaaggcctagaaagaataagctgagtgaaggtttgtgtgtggcccatccagggacctgcgacaggaacacagcggctgaggaacggatgcttggagaggagggggtgctttacatgccaggcgggcagggccggggtggggccagatgctggaggagagggytggccaaggggtggcagagaggccccccaggtggcaagtttgcaccctgttgcttcctgcaaggagcttttgtttacgttttcagcttggacagtctggctgtctggccaagagtgacaacgtgacttaccatcagagcgaagcaccaaagagcacataaatgaagtggagatccctcctgtgtccagcctccccctccccgtggccttctcctaccttcccagtcctccatcagtaccccggggccttgccagaatctcagaaagaatctctggactctggctcaggacctctgaggtgattatgcatctagaggcatccccaggtgctgcccaatttggggaagcrgcacttcccgctggaagctgggaagtttcccctggctgggggtcctgtgaggatggagaggccagaatgaggaatgggttgtgagtcaagaccaaccagaaggggacttagcaatgtcagatgatagcctgggtgaactacatcctgtgtggaaaaggcaaggtgtaactgcttatttcttgtcaagtgagcctaatatcatcatgtttctttttatgcctgctcccaaactcagcccctcccagtgagatcacagctccaggaacttgcaaggaaagggactaacggggcatctgattcacccgtgtgcccttaatggcgtattgtgtgaataaagcaacaatttttagyacagggatttaaaacaacttctgcaaagacagaactaaaaattaatcttaaaaggtggagggttggggtggagggcaggaaagaggaggaactaaattgccattctctttggagactttctaaaacctaagacgaagaagaggagccgaattatggaaacaaaacctttgcggttttccacagaacaaaaatgatgtgaagctgcaagtcagcagttctggcgcaggggctccgggggacgcccgctccgccggctgtggtgtgcgcccttcctgctctcccctccgaggggctgaggctccttttgtctggcgcgcgcgccccaccccgccccgggygagggaagagggagcgggcaccccgcgcccgcgccgccgccgtggaccaaggttgtttactactttccactccgaataacacgccaatcaccagggcccaccctccccgccggccaatcgctgcgttgggaaattccacctttccgcggggcccgggcagcgactggctggagtgtctgtcagtcaagtgggcatcccgcaaggatgcagcaggagtattagggaggcgatcaccagagcagaggaggagtaaccttccccataaacaagatgtgttcccccsactaagaaagcgggtggagggtggaggagccaaaacacatcccagccccggggccccaccggagcgaagcgggccgagcgcagagtgcagagtcggggaatccctccctccgcctcccgccgtcgctgcagttgtaaacacgtttccctccatgtctgttttcccttctctctcaccgtggccattacgggctgctgtttacaaaaatcctgcaggcctttgacaccccgtcctcccttcccccggcatccctgcccttattctggctttyttctcttccatctcctggtgagcacagcatactgttctcaggcttgttttccttttattgctctccatgtgggacaggtcatgctttatcaacatgtaccattttctacaaatgccgcccttcctctttaaattgcttggatgggcagatcgattttgattagcaacactgcagcagaaacaagktgcatctctggaaggactgggtggttttctcgttattgttgctggtttgggtcacatcggatgctattttaaattctgtgttttattccacgatgggtcttgaatcctttccctattcctaggtttgaaatatgtttcctccctttaaaaaaaagaaggggggcagtattgtgttgaaccaaatgtttttctaccttctcctgtgatctgaatcaggtttcccatttccagcagtacaatgtggttgtattcagtgtgataggggcgtagtggacatgaattatttgcgacagggctgcctggaagatgcggagcggagtttgcgtggcccggagcagctccagtgtctgaggcttctctgtgtcacaggctccaagcaggaagcgcaggcaaaatrgcaaaayacagcatgtggcattcagttcaaaaatgcccttttttagaagtcggtattctaaatgacatccagtcttgcttagttttttaagagaaaggaaaaataatctatgaagatggtttggaatattttgtgaaaagccttttcagcataaaaaagatgatcttgagggtctggtttgcggagtggaggataagcctccctcctgcgattctgaattgctttttggtttgtaggaatttcaggaacatgttgcaaagccgtggccgcttgaaagggtcggtgccctgcgccccgtctcagcccctgcggcccctgaactttttcagtgatggggcacttggggagaagtgcggggagtggaggaggaggggaaggtgcattgcaaatagaaatgtaaggcgtggcctgggtggccaggatgtgccagagcagcctccagacctacttaaatcccaggaaaagtcctgcctcaagttaggcacaacatctgacttggatttctctctgtttttttctcttccagttgtctgtctgtgcgccctctcccacaaggaatagttttccacactgatggaattaatgcatatcgtggtattattggtggaatatgtttaacctttgtttcgtgatttgagaggaatggttcttgtgtatcgtgtggtgacagcaggttaaggagagtgtcagagctggtgcagagttttgccccggggccatgaggttctgggcatcatgactctcttatgaagttacaaaackgggcaagtgattgaaggcagaaagacactgtaataaagtgtgctccagtgatgtgtgctccggcttctctcccttactcatctgggccaggtgctttcgccacagtgagcctgggtgtcccctgcctgagatgagcacagtgatgtctatgcgaggttgtaggactcagtgaagtgccttagggattttgcctggcactctcctgggctcmtgaggtgcctagggctgagacttccccttctctgtctggtaaatcatctctcccattctttcttctgcggcccttcatatgagctttgtaatttactcagggtggcagggtgaattcatcttttgctgggtttctgcatcacctgctcctttctggccaggtcagcctgttcattttttccatgccaacagcctctaagtgccagtaagtcacgtctgaacaaccaaagcatgtttccctgcgggagaatgccagggcaggcgggtctgggagccaagaggatttctcctgttcagataagtcgggggaatagaagagccctgtgacttgagacaagctttgagtgacacccagtgaatctcccatcactactttaatccctgccccagtgttctggttccccctttcctgcatgaggcagtacgagtaccctggcctggctttgggttctacacggtctgactttagcctgccttggtctttgttcccctctcactccctccacccctgccccccccmacacatgtggagtaccttaccctgccttcctagttctggaatggctgcccctgtgccaggccaccccattttctagaaccaccttcatacagcccctgcgcatcccactgtactatttccttgtttgtttttcctgtcaatcttgccttccgcgctaatgggacactgatgctgtatggtgatgtgttctcccacagtcatcttytcctcctgtggttggggtggggagctttctctgtgtccccccatgagagtgaggacagtctcatttaatggcaccatggtctgtggagccaggcaggcctgtgtgtctgactccacttcagcgctctcagccagcgtgggcacctcggacccagacagacgccccgagcctgtctttctggagaaggaagtagtaataccttttccttgagggagttatgaggattaactgtgcctggccctgaattcgtgccttgcaggtacttaggaagtgagttattacaagcagtgctttttatcatccatagatggagatgttatctaygctataggactgcagaaagaattacagagaattatgtagaatcactagggacttgattaatatttgtttacctttcccccacatggattgatgtcctttattatacttttgtacccccgcttggcaagcccttgacaaatattgatccaacaaaaaattagctctttaatgtatacgtttagaacctgttgctttgtcagtagtggtttttatgaaaatgaatgcttataggtcagacttctggaaaccctaatctgagggaattgggccaaataggaaagtgagccccttaaaggcagttgtctgaccagtacttggagcacaacaggttcttgctaaagcactgtgtttttaaaacagtggagttattaggttgaaattctgaatagcaagaaaaagaataatggaagtgctgccagccccgtgatgctggtgcagctggtcagtttgcagaaggaggccagttactagagcagagtggccgtagaggctgcaacacggtggccaaagcatgaagctgctgtatagtggcaaggtcacagtgatttccccrcagcctcggtttagagggagacggggtgtgctgagctgtgcctgcttctgtagaaggggccttctccaagtctgagtagccttaagccwttaggactgctgagtctttctccacaaaaatatgtgggaggcctgcagggcaggtgctcaactaagctctggggctgcaaagatccagagccatgcccctccttggaggcaggtccttgyagacgaggacaatcgtagccttcctgattaaagcaggaattgtccaatcaggctatatgacgggcatcgtccatagtcttcaccaggggagcttttctgactatacatctctagccctgtggcttgagccagtcacttaatttcccctgagctttggtttcctcctcctggtagcagagagactatcagagtgaggggcagatgcaatagcatatgtaaaacacttagcgttgggcctggtgtttaactgcaataaatgttagctcatattttactgtgacatagatgctgtatgccttttgctgagtattaaagatactgagctgtagcatgcatacttgcatgaatcagtctgctaagttattttaagtttgcatttgaaaataaagggtggattgctatccaaatataaagaattggaaccaggctctaaaaggatgtttgctgttctttagcaaaataccattcttcttaagtttcattcaatcattccacaaaaatttaagcatctgttttgtcccaggcaggcactgtgcttgtaatggatgtgcaatagcaaacagaacacttgctttcagctcacacagagctgactcctgggcagagaatttcgacagtaaagaaatacaagtgtgatgaaggagaaaccctttggtactacctgctacatgttttaatatttaaatgttgacttagggaggtctttccatctaaaaataatgatttgccctttctcctgtaaatgacccctttctcttaagttttgggtgagagattttttttttttaaggaagaaagatattctacaatcgaatgtacaactgagataatgcttaggagagaatgtatactgggtttgtgccttggaagttgcttaggggaaacagttgtgtgcagttggaaagctgatgctttaaagaagcttctataaagtgaccccacaattaaactgttttgtgtacatctttatttatttatttatttattttttaattgagacagagtctcaccctttcgcccaagctggagtgcagtggtgcgatctcggctcattgcaacctccacctcccaggttcgagcaattcttctgcctcagcttcctgagtatctgagattacaggcatgtgccaccacacccggctaatttttgtattttcagtagagacggggttttgccatgttggccgggctggtcttgaactcctgacctcaagtgatccacccacctcggctttccaaagtgctgggattacaggcgtgagccaccacgcccagcctacgtctttaaaaataaatgtaaatacccaaggctcacagttccgttcttccatctagtctagcaccgtccagtggaagtttccaccatgatggactgttctgtggatgccctgtccagtacaggagccgctagccacatgtggctatggagcacttgaaatgtggctagtgctacggaggaactggattttggatttttttaaagttttaatttaaatttgaatagctacatgtggctaatggctactggacatcacagatctaacacaggattaactgacaaaattctttcctcttaaaaatatgtgtttattttgataaggataactgagacctgtacattccatttttcctgtcatatttagggctcataaagggggtggtatgcacgttttaaaaaatgcaacacaaccagttaaaccagctgtctaattgtacacatttcctggagctgttggtgttgattattagcaaatactaagtacttgtaatgacctaagaactataagacaagcaagtcgtcttctgtaactgagtatcagcggattcaagcgttaaggaaaatgattaagagaaaacamccaaaaaagtcttaatggttctgtcaatcaagtggctatcaattcatggctattcaaaagcttttgtggctatgaaaataaactagattgaaaaaattctaaaacaaaattgaaacactcatttgagtttaaaattttagttgagttgatttttatttcttgttttggttcatttgtagtttccccccgcttcgttgtttcctcagatatggagaataaagcctggctggtcagtttcagtttttatttaaattcattttrtcttcattccttttaatctagcacagtcctgtgatgtattgggatcacagtgctctggggaaacattgaaatataaaaacattttcctgaaaacatttccagttatatttaattttcctccttgaatagaaaaatatttccaacttaatcctccctctcccctcttgaaatgaattgcatgctttggaaataacatcaatccacccaagtacacaaggacaatctcagccatttaatcgagatataaaggcttagagaactctgggcttcggaggcacagactccacctttcaggatgctaataaacgtggacgaggtctcgcctgggcttcctcctccattgttcagcgcagcaaaccagcacagcactccgtggccagggtttgcggggagaaatctctcactctgttttagtagcatcatcatccttatcagcaccctgcttttatttttgaacagccaaacttcctctttccaaacttcgtgtgacatctgggaccagctatgtttgaaggagtctgaacatgccacatagtggctcacgcttttaagggaggaaggccagtaagcctcctcaatggcagaattctactttcagtctaccctttggttctgttgtggttgttccttagaactttattctgctcattaggaagcccagcctccggggagggtttagcttctcatctaagcaagaagtaaaatgtcataatggaggaaaaaaaaaaaaaagtccaaactttttttggacttttagaaacacatccagtttgagctccactgagctatcattgcagttacaaagcccatgtatattgagatcggtgtaaaaattcagcatgtccacctgcataattatgaccagtgtattgaaagcacatttcatttagttttgcaacagccgatgaggtagattctaccaacattgttttacggaagaacaaatggaagcctggaaaaataaattgtctacctcayacacttcgcaggtggtaaacacaggatttgaactaagacatacttgattttaaagtgtttgcttttcctttgcactactgcatctgcgatgtttgcactcagacactctagaatatttggtgttgcatgtttttgccccaagaaagaacccattaaaatgaaactttccagttcgtaagctttgccctcaagaagggaaagaacttcttgcaaggtttctgaaacaaaaagaaaatgaaaagtaactttactgtatctgggttttctgattaaattacggtttttgcaagcttgtgcatttctcagtgtccagatagccaggatttttccttttaataaatatcactttaaaaaacaaacacacacattcttaaatgcatgattaactgtatagattgatttagttataagatgtcctagcctaaatataagaaggtgtatgtgttagaattaatttcttcaataaagagaaagaaattcaggaattgtggttctgttggtcttctgtactgtatatttttgtgcagccaaagcagcatgccttgcttcttggtttcatgaccacatgggtagtttcttgaagttttttcttttgagatggagtcttgctctgtcacccaggctggagtgcagtgacgcgatctcggctcactgcaaccttcacctcccgggttcaagcaattctcctgcctcagcctcccgagtagctggaattacaggcatgtgccaccatacctggctaatttttgtatttttagtagagacggggtttcgccatgttggccaggctggagtttcttgaagtattgactgatccttgactctgaactgtatgatcaaagacttttgaaatggcacaccgtttcttaacatttaggccaatttcagttgctcatatccaaaaataagtcatgattttcggagtcagtgcgcagcacttagtacaacaatccaaacccttgtacagaccatcctagtagaaatgtggatcttgagtatctcagcttcttagtagattttgaactccgtgaaagcaggagccaggcctctcamagcaagtctctccaatatgctcagtaaatatttgtcagatcgagcaatgaccagatgatgaaatacattaaagccttagggagaactgagactactgcaccagtttttgtgcactatcatgctggaaatctttccaacatgtattctgtacttctttgcttcttactccagtgaatataatttagtcatttctggccaacttgaggacatcagcgagcataaattgttgtattatgcataatacagtgataccctcaaggctgagtgggaggcagtttgccctctgctgaaggtttcttgtgcttattgtgttcttatggtttggttttaycatttttatgtctccatttctgtttaatagacttatttcagtaagaagagaaagccgtctccatcagcmcctctgtaggtgattatttgccacttcctttttgctgtgagtgctttgaaaacagatttctaagcttgttagagttatgtgttaagagtaaataggcagtaagtgaaaccaagcttcttcctggtgcttgactaccccagaaatgtttatttgctgaatagttgagttctggaaaggtgaggtataaatgtgtgataaatttattcctttgcatgatttttttttctttttcttccctccctccctccctccatctatgtctctgtctttctctgaacatctctccgtctcagtctgtctctctcatgatagttgctggaataatttaaatgaatgtaactcatttacccacatcgaagcccaactcagtagtgaaaaaacaaatcttccaaatgaatgcactttccccttgatgtgctatatacaagaccttggcacacctagttcaatgacatagtattttagaagggcctccttacaccttcctctcagataaatatacatgcagggacattctgaagaagtttgttatcggtcttctcccctcctactattagctccgccctcctagtccttctctttcaccatgctgacccgcgtagggaggacccttacaccctctgcatgcagcgctggtgctccttagtgttcataaccccaacctccatggcctctctcgcagttctcaggttaggccctgcttctaggggacattagctttccaccctctactacatacttcctagttgttgcagcctttgcaagcaaaacttgttttcatttgggagacagcatggtctgacagagcctagatcctggggtgaagacattctgggtttgtatcccgtctttaccacctctgagcctctgatgctggacaagtcagcaagtctttgcaccttagtctcctttctgtaaaaaggagcttatggggatgtaatcagagaagccttagcatggctcttggtacaaggcacggaccaaatccatggtacgctcactcctttcctttcagtaatactgcctaaatagggcacatgtacctaaaaggattttgtacattccttgacagcagaattctcatcttctgttgcatatcccataatgctgggaacacaaaataaaaatggtagcttttcacattcacttttggcctcaattttttgttattccccaatgaggatcatttcatttggggctggtctccggaaaaaagtagatcaagcttttcagatgagatttgggtgaaaccctgacaaactcttttttattgccttccctaccacatagtggtggatcaggaaactgtagggcttatgatgctgggaaatttctgctaatgcaataaagatttttgctgttgaaagaatttgatctgttttatgtataacatgcagagagcagaagcatatattatctgtarcagatgatagagcagggtatatgggcaagttagaaaaacacagttctcactacatttgaagaaaaaggacaaggagttgtcacaaggatccaggagagtcgcacataattttctgtcgtgcattttgttgactgttcctctttgcatccttcaaccatcttaacttcccacttgcacctcgctggaagacaaatctaagctaaattaaatgctaggcaatatgtcagaatggaaagggccctcaacttgggatgcccggttctctaccagcctgaataaactccagcaacagtatttctctaggaatcatctgtaaaaagtagaggtttgtcatatctctaaactagggattcaccttatttattaagctatcagtgactttatcttgaggtgcayggcttttagtaactctggttcaagtgcaaggaatgcaaagttaagtgtatcattggaggtgggatttttgagtttgtcagtcatttattgatttgcatgtatccttayagttcaaaggtctttttctcaacttagttgatgatcatgctgtaagttgttttcttttgctttatcaacttttaaaaacgtttattaacttttwaatttgaaataatttcagacttgcataaaggttacaaagagtaccaggagttctggaacaccctccacccagcttccacagatgttaacatcttacataaccgtaatacggttatcaaaacagtgttcactccatactccagtgctgttaatctccagactgaattcggatttcactattttcccactgatgtccctttttttkgttccagatccaagagacgatcctacctggcatttattgtgttcagtttttctaattctgggacgttttcckgggttttctttagtcattcacgaagttcgcacttttggagaacatggggccagttattttgtagaatatctttctgttagagtttgtggatgtttcctcctkattaaatttggggggtacatttttaacttggagatcacagaggtgctgctgtttgtgtctttgcgcatcctgtcaggagatgcgtgatgtttcctttcctggtgctgttagctttgatcccttagttaaggtggtctctgtggcttcctccattatcattactatttttctctttgtaattaggaagaatcttttggaggtagatacttgagactatctaaacaagcattctgttcctcattattctttcacccactaattttaacatccattactgtgatgtttgccaaatggtgattttctatttctgttttctacacttagtaattggattctactctcaggattttatgtattttttaacagtgagggacataaactttttaactagcagtggcaagtccacttttatttgggaggacaattactagtcacatgaagaagaaaaaatatgcagaascttaagaaatcccacatatgaatgttatttgaaatgttcttgccctttctccctacaaaggaggtgaagaagatgacaggagatgttaattgccaaaatagtctcatagttttggtcctggctgcaaatctctcgtttttgatactcaagagaatgctattggggaactgactctgaagcacagcccagatgcttgagatgggttgggaaggtttacatcaacaccatgaatttaatttatcatgtgacattttatttctgagtttttaaagctgtaattaaaagaagtgttcaaagtgttgctttcctcttttagaataaacgtggctgggtgtggtgcctcatgcctgttatcccagcactttgggaggccataggcaagaggattgcttgagccaggagtttgggaccagcttgggcaacatagggaaaccacatcactacaaaaaaaaaaattagcctgtcatggtagcatgcacctgtggtcccacttacttgggaggctgaggtgggaggatcacctgagttcaggaggtcaaagctgcagtgaggtgtgatcatgcccctgctctccagcctggacaacagagcaagacactgtctcaaataaataggcaaacattaccaacatggcaaacaagttggaggaggccccctatttaattaaatttcagcagtcccaaatctaattggtatgaagaaatcattattcagaattttccatcactgaaatactaaaatcacttgttgtttgagacatcttggcctgtcacccaggctggagtgcagtgttgctctcatagctcactggagcaggagcctcaacctcccaggtttaagttaatgctcccacctcagcctcctgagtaactgccactacaggcgtgtgccaccatgcccagctaattttttaatttttcgtagagatggggtctgtgttgcccaggtccctcttgaactcctggcctcaagctatcttctccagtcggcctcccaaagggctgtgattacaggcgggagccacagcgctcagcctaaaaataactctttagccaaaagaaagttttaaaaaaytgtctgttgtattctttgattttactctatgtggtcttttctattatttttaaaataaaaaagatttatactcctcaagtgtaacattttatcaaatctcatgcttctgtttgatgaaaccgaatggctaaattttttaaatatcatgcaatccatcccagtttgtaattttattatggccctcacacaagagcgtgcaagctatactaagcttcctgtggccctcgtttttcctcactgatatttgtaactcattccaaattaaattttaggagtctgaaatgtagctgttatatttgggagatgtgaagaaaagaatcgtaggcatctcagtaggctaggtatcagatcacacatgcttgctggaccaaagaggactccttacagtaggatacatgattctgagttagtttgtgtactaagtatatactatatagcttttgaaggggagacgggcacagaattcacaatatcatgcactaagggttattttgtgtttgcagtttccagatgaatgttttaaagttggctgcagaatacagcgagataggtaaaatctatttgagtattacttacagaccccaaaggatatcccaaaggatatgttggactaattcctaaaatatcctgtaagtcattgcaggtacaggcgtggatctgggtttggaaacgccgcctggatcgctggctgggctcctgcagccgccaaggaggggctggctggaggtggggctcggcgtgcatagcggccacgtgactgcgccccggccacgcccaccgtccctcacgtggtcccaggccacgctgggcttcggcatgtgctaaagtggatagaaaagggagtggggcccgggcgtggctttgtggtttgggaagatatgaactccttggggtttttttctcttttaattctttaattttgatatttggaaatgcgtaaaaggtttttcatttgtccttgaccacgtggtccaaacctcaatttccctagcagaacgcggtttcgatcactggtggatccgtctcacagcaccrgtcatgctgcctcgctgggaagtggagggctcaggattcccgtggttcacgatccattttatgttggaaggaaatcattttgaactatctcagtacacaccctagtgtatctttaaacctaattgagtgttgatggaaaatctgcggtccgagaaccgtaagaaaagggggctcccacctcccgctctggggtcgccacttgcctcgcaggcaggaggaggctcccagagtagatacaacttgcccgtcaccyggatgggttggtagtgcacatatgcacggggcgcagtttaaaatgaaagtaaaagatgcaaatgtgtttgcaaaagaaaaattaacataggatacgtgcgggcgttctcagttgaactcggtcttactgttccacgcgagcaccccatgactcagagcccaaatctcagcggaacagcccaggacgctcctgccgtccacaggaagacgcctctgtctctgtcccccgccgccaccacacagatgcacgtactctcttcacttccgtgtacccagtaaatgcagatcctgatttaaatctgcagcaygctgctttcttcccattgcatgtgggaagcttcaggttctcttcggtttattttctcatcacctttattaaaatgcagtaaagcaaggagtrtattaatgcgggcctctgcaaatagagggaatttattgaaaagcagaatggcttgaaagattgaacttcatcttaaaaatcagaaacagactcttgttattaatagctttagaaacgaaaatctaacttctgataaattatttcagaggagtggttcaaacgtgtagtagatagctctgcctggtcatcaattatagtgacgtccttgcatcagctccagaaactcagaatattcatgagctttccagtctgactcagaccttcaggagccatgaaattttcctgttgggatgagaggaagcgctggcggtcgtttcggcagcttaatgaaaccagaaatagataagcacgagtgaggggtgatgtccgcttgtttgctcccatcatgttgtttttaatgtgtgaaagtgaaagttttaaaagtcatactaaatgtgtgatcctttttagaattcactgggtacgggtacgtggaggaagtgtttttgtttttgtgaatttgtttaaacaaatgactgaggctttgttttccactctgtctggccaagcaccattgctacacttttttaaattcatgacatcctgagcagtgaagctgttcttcagcccgcctctccatttgtgactggaagacaaggaggcagacaccaatggcgcctctcacaatggaggtttatttttttttaatctaacggagggattgtagatggtgtaaaacttccttgtgccaggagagaaagggggagagagagagagagagagagagagagagaaataacccattctaaacaactttaggaatagatgatccgtaggcatcaactttgcgcagcaacaaaagccactttctgaacctcgttctgtgaagttttaaaacaaattgggtttgtttaattaaaatatttcttaaaggcaaaaagcactgagctaatttttaagaattttaagttatatattaatatgagtagtgatttataattttctgttgaaatacataaattcgagaagccccacccctaccacttgccagtcttgagtccccacggctcctttgcctaggtctaaagtcactgcttgcacactcctgccttgcatatgccttgccatcgtgtgggcctcttggctggaagtgttcttgtcctcccgttaggtatcttttatgacgtgaatccttacctctaattattatctgtgtgtacatctcatcacctgcatctgactgtgtgccttgtgtatgtctcttagccctcacaattgcctgacatgccttacaaacgggtagaccaagtgttaaatgaacaaatatttaataagaacttaaaagctttttgactttatatatttttaaagccattgtgattaaacactatgtttgatgtggtgctaattctgtgctttatcaactgtgtgaattgtagtatttttaaagtaggaataattgagaaatattttgaagttaggttaagcatagcagtaaagtttccactttttaaaatagccaaatccaggccaggcgcagtggctcgtgtctccaatgtcagcactttgggaggccagggcgggcagatcgcttgaggtcgggagttcgagactagcctggccaacgtgrcgaaaccccgtctctgctaaaaatacaaaaattagatggttgtggtggtgcatgcctgtaatcccagctactcagagaagtgtttgaacccgggagttgggggttgcagtgagttgagatttcaccactgcactccagctggggcaaaagaatgagtgaaactctgtctccaaaaaaaaatcagagcgtggtggtgcacacctgtagtcccagatacttgggaggctgagatggaggtcaaggcttcagtgagccatgatggcaccactgcactccagcctggacaacagagtaagmccttgtctccaaaaaaaaaaaaaaaaaaaaaaaagccaaatctgttgggtttttttttttgggggggggggtcctttagaatggccctgacagatctttaaggcatggaaatgagccttatgcaagctcctggcaatcagtatgtgagttctgtctccttggcaagatacagcctcttagaccctcagtctggggaaataatgctgatttctcctacgagttacgagaattacgctagaaaactctgtggcgcatacaggtgccctgtagcctgttggttagaagcactgaccctgaagtcaggtcgcccaggttggaattccagctctgccttcttcaagctgtgtgactctgggaagtcacacacactctctctttgtgcctcaggctctggttctgaagatgggaacggcaggccctccctctttggcttgttgcacagatgaaatctgacagcgtatgccaagcgcttagcacgggtagcagtgagtgccccgtaaatgttaggtaccttcctactactactaaacattcattcttcccttccctgctagtacctgcagctctgactcatctcacacccttgagagaggattatcttcattaaaaagtttttggtctgcccagaagcaagtgttacctgtgagagagctgggcttgtgcataggttagattatttctttgggttattcctggggaaacctgcaaagaaatgcagccagaggcctctggttcattttactgctcatctcctaaaagtggtttctcagatttttatcctttttttctctttttcgaggaaggggcaaggaaatattttttcatattattcttgtcatcgtctatttatttaataacagttgactgttgaaacataggaaagtacttatccgccaggaaactcccttctattattggacttacttgctttccatttatatgttgtctaattccaaagagatttcgagacagctttcaattaaaaaaaacaaacaacaacaacaacaaaaaaaamcaccacatrccgcatgggtattacacaggacctgtatggtcaaattggcaacgaccacaccacatgagaaggaagattattcttcctggaacctggctcccttgagattcttttttttttttttttttagacggmgtttcgcccttgttgcccaggctggagtgcaatggcacgatctccggctcaccgcaacctccacctctcgggttcaagcgattctcctgcctcagcctcccgagtagctgggattacaggcatgtgccaccacactcggctaattttgtgtttttagtagagatggggtttctccatgttggtcagggtggtctcgaactcccatcctcaggtgatccacgcgcctcaccctcccaaagtgctgggattacaggcatgaaccaccgcactcccttgagrttcttgtaagccaaggcagaagaagagacatcttaaagtctgtatgtgcacacctgcctccccccattttatatacaattcaagggctttgcttttggaaagtttgcctatgtagtcgtccagggctaaattaacacctgtctctatctgtgtgtaaggctctctgggaggagctgtgaggcaaataaaaataaggaatggtgtcccgcaaggagcttacaatgtgtgyattacaagtatatactgagcatggccctgggaacacagtgaaaaaacaggattcctgccctagtacagtgtacactagtggaagagagagaggcagtaaacctaaaagtaagtcttttaaaaactgtggtaaaatgcacataacataaaatttaccatccaaccgtttttatgtgtacagttcagtgacagtaagaacattcacattgttttgcagccgtgaccatcatttatattcagaactcttttcatctcgcacaactgaagttgtacctattaaacagtaactcctcattctctcttccacctaggccctggccaaaaacaaaaataagtctttgattgtaaacacgatcagtgctttgaaggagatgggaaggatgttatcataaaatgatggggctgcaggaatggcacctactcagagagggcggtcaggagagacctcttgggaatgatgacatccagcaggcaggtcattaaggcatctctaggcaggtccagagtgcaaggaggcataagccaggcaggtggaacagcgtgtgtgaaggcccagagtcaggaaatggtctgcttccttccaaggaaaagaaaacagccagtgtggttggagcaggggctaggagagaaaagatgtgcatgtgtgtgtgtgtttgtgtatccccatcatgatttagtactgtcagcgcttctgtgttctgaacctggagtacaggcagacacagccgcatcccagaagctcaagagtgcccataccaggaaattacagaaatctttgccaaatggatgartgaatgcaacttccttgatacagggtcagagaggggaaatctgagaaaagcaggtgggcaatgtactcctgacatactcccttccgttgcaatggccttgagtgatggagcaagagtgaaggaatgttcccatggcactggyaccaggatgactttttgtgaagcagagcagttggtcttagatagtggaggtgcgggaggcatgagaactgggcagtctgacggctgcaccagccagttggctgtcctttccacctccatgcccaggagctggcccagggcgcgcatgcacaaagccagtgctcttttcaatcagaaaacagcctgcgtatgttcttgcttgcaactcagatatccagcccactgatccaggaagagattcctttgacctgggaagtcataatggcagatatttaracccagctctcaagcaagcmtccaagttgttccggtgaaccygtaactttgagtaacctctgattgaaccagagagtaggaactaggtgcagaaccttgttgaatagaattgtttagcatcgtccatttgttagagcatttcaggatgcctgtcctaaaatttggtatcataatggtatttacctctcactcacctccatctcagcccagtaattaataacaagggacttgcttcttcacctgtttctttattggttgtaggaagtcttttccttaccacagaggaaggagcttctggatccctttgctacgtccagagagttttcatctaatctgggtgtattagtccattttcacactgctgataaagacatactcaagactgggcaatttacaaaagaaagaagtttattggactcacagtttcatgtgactggagaggcctcaaaatcatggcggaaagtgaaaggtacatctcacatggcagcagccaagagaagaagagcttgtgcagggaaacttccattttaaaaaccatcagatcttgtgagacatattaactaataacagcaagggaaaaacccaccccatgattcagttagctcccggcgggtccctcccacaacatgtgggaattataggagctacaagatgagatttgggtggggacacagagccaaaccatatcactgtgtaaaagttgaataaagttatttaggagcacattgtattgggagtttgtttgtttgttgaagagccaagtaaagtcattggaagcatgggaaacttttttccctgtctaaaaggaactccttcctagtggaagttgaaagctttcttggcagcctcagcccccaccctacctccaccaccccagtgggtacctgcatcctgaagacccttcacaatagcatctgaactatactgggccttcaaatgatgtcttgggtaaacccatgtccaacctgcactaaatgaagattattttcgagcgaatggattgaagaacagtgctgaaaaactagaatttgtaatattttcatttgagcagaggtgaaatttgaaatattttagaatcttgtcttatgattttttttctttctttgccacatagccctcccctggaaattaaatctgtggattactagtatatgaactgatcagagacatggcttggggtctccccatttacccacttcccagcacgttataatccactggacacctccaaggatgagagaccagcgggtcataatgcgagactggacatctctcctaccccatgtacacttcagctgagcaggcagaattagcagagtcaggactagaagttcagtctagggatcaaataataatagtagctaatgtttaaagagtacctaagatccgccaggagacatactcagtatagttccgtggtttgccacatttcatcttataccagtagcacaggtgaaatttgtcttatgtgtatactgaggaaaacaagtccctctgatacacagcagccaataaatgacaaagctgggatagaaacttacttcattctaacccgagagtccctgttcttgcatgggcacagcctgccatccccatgctctgcctcctaagcagaggatgaacttaagcatcttaaaattttaaacattgactttccctaaaaccaattaaaaaaaaaaacaaracagacagacagacatgacttgtgcccttaaaaatgcagccaggctggcatataaatgggcgtaggctgtttctaaattttttgctttaaattttgccagcatagcttctggactggtagttttgtttgctttttaatatatttttgacactgtgtacagaggaatgctacctcgcgtcatcatgtcctcctccctgaaggcaagccaaggatgtcaaggggccacttcaggggatgtgcaccctgaaggtaaagctgctccagtgggaggggttggggtaaatgacaatgttagcagctggtaaatttttttacatgggatatctcacaagacttattgatgcatgttatacgtaataacctgaggcacatcaacattttccactttttcctattctttctgtattttcactgatactttttttcaaaaaaatctccaataagtttaggatcagcttcaagatttctctttaggtaaatagatttgtatttttgatggccatcctagtccagtgtaaagatatggacaagaaaccccacataaaggaagcaagatygctggctgctttctctaggtagcttgagttgtatactaatttgtagattatttctcttcatcgaaaaaacaaaacattctgcagagggcagtcatgtgtccgctgtgcctctgctcctgtgtgcaccataaaacttgaaagtgagccagaatttgaaartatcggattgggatgtgatttctttaagcctctggctaatttaatataaagtgtttacacttcatttttctggcagtggattttctatgtaggtggtggaagatttcctgtaagttttgcaagttccagggcaaagagagttgcaatatgcaatatctttctgtggtcacaccaacagaaagggcgatttcttaacctgctgcagttaccatgtgtgtaggtggatgctggctattacagatggtatcctttcaaccctcaaaattgttgcaagttcacaggtatgttaatgaaaatgaataagtggcatttttaggaattccaaatactgagtcttggaagtagataatcttttccctaaatgtatgctccggtcagaactgctgcctaccacacctcgtgggtgaaacagatatttcgagcatgactgagcttattaagagccctgcggcgcttcctctgccgggggtttagaaatttcaaaggatgggggttgagggagggaggagttatgggcatgtgatgtggacagggcgggcaggaggatggaagtaacaggtccaaaatrtatctttggtggcccggcagagctcttgcatggggtgagaatggtaatttaggaagagcaagtcttcccatctgtgaagcagaagaaaaaagtggacttaaggagaagttcgggtgctgtttatttagataggagtaaggagagtgcagttggggaaaagcacttcagaggctttacttagactagcagaagtctgtttggcagggtgggaagcaagtgcagttgggagaaaaacgttttcaataggcagtttcagaattggaaattggaggagggcagtccatttcaacatttccaacagtattaaagaaaatttgcgggttgtttgtcaaaaggggtcatatgctttaaagattgagagatcttttcggtgaagtaggggagctggggacatcgtgatgtgacaagagccgtgggctcagaggctggggacctgggtgtttaacccaactcttgtgagtggtgtggctttcatagctttggttctctggtcttcactttatctgccaagtgaagacatttgactggatgtcgtgatcttgagttgctttcagctccagawttcgaagaccccttccattgggcattcatctaatttcaaagatgctccctggctccagctctgcagtgaagcagaacaaactgatacagcctagcttgggggtggggagtcggccctccttttcccctcccttcccaggtcctctgggtgattgggggaaactgagaagccgttctcttctccagagcactccatttaacaagcattgcagagcctggctcgtgctgcagtgaacaaatgctgacttcagcctttaccctgggtttcaggtcacactgattgtttgcaaaacatgttctttttttgtcacttgccagtacttgttctctgtgagtaaaacacaaacacatcctcagggatgttgcacaccagtttgcagcctgcagcttctgccctctggcctgcccaggtcctcggctccgggacgaggatgctccgggatttcgggagacagcagttgttttgacatgaatctcaaagttcctacaaagcttatttctttgaagaaggccaaaaaaaaaatgaaacattttcagatctttgttttcagattattcaagtccagaatgttggataagatttttgaagaagagatttatgcttgagattccttttagtttctttctttcttttcttttcttttcttttttttttttttttaggtgacttggccagtttgggtttttacggtgttcagggaaagggttaagaagttaatttgggaagtacagtcatgtgttgtacaagttgctgtctactgatcccttcattgagcaagtaaacttcacacattctcgtgtctgcaaagcatgtggatgcatgggcagttatgtgtatgaactttttttttttttgagaatggctttagtgttcagaccaaggatggaatgaaagatcacgtgtgctttccactgtagagctgccctgcttgttttgattttatagttattctaagtgttaagttccttcatctttcaaagcaaattcctttgatccctgaaaatcagctaatgtttgggaggcaattaaaagatgaggctgtggggttggggtgaaggcttccccagcaggaagagaggagaagcccactggatctgggagcacggtgctaggactctctaagcgtgacctccttcagtttggcccagagtggtcagatagtttgccggggcataggatggatgacaggcytcatacgcatcacgtctgaagggaaagcccttgaattttccacgctactttttagtaacagtaggctttgtcataattggcttcatgttccagctttcctaaaactgtaagtgatgttgggtgggccagcagcaaaataattcacttwacaatttgcatgatagtctggaatgaaccgaatacctaaaaccaggaaataatagtagatatttaatggtttggggatcaaataagaatttactcccagatgtttcctaattaattggaaaaagcagaaggttgctggaaggccatctccattgggcatttacaggtgaaattcactcttcaactaggattttactcatgggatgcctgtgttcttcatttgaacccaattttacctatcatctacaaaaaaagaaaactattaagagttaaaaaaaaaaaaagagagagagagtcttgaactttgaaatccttcatccacgttttataaagtgtggggtcagattttttccctagttgaaattgaggaaatgagagttgccaatatgattggatttgtactgccaagatggggttttagcacttctaatgcattctggcaaggctggtatacttgtatcaagtgcacagccccactaccaccasctctaccacccacaaaaataaaaactagcaaaataaaatatgagccaacagaattctgtgggaatggcaagtgttttgtttttgtttttagtagtaatctttgcgagaacattccaaagatgatagttttacatttgtatgtttttttccgaggcacttttgaatcatcagatagattaaatataagttccrtgtatttttgaaggtgggagtgttctttggtacagttcccccaaaaaactggttctcatgaggcttatgtggtaattctgttaacgagaatgtatgattatctgggatactctgttctgctctccatcctggataagagtttactttgaaagtctagttgatcttttgtgatttctgcacaatgtaaaaggtactttaacttcaggagatagggccagcaatcagatttgatgatggaaaagagtagtgtagcatttaagcataatgtatactctataataaatgtttacaagtccaaaagtgtgccatcagaaagtaaccagatcaaaggagaggtgaccagagaagctggaaagataagaaataaacaagtttcaaggttactgatctgtagctgttgctgtccatgcttcttggcagctttaattatgacagggagagggacccagagggagagagagagactgacttacacataaaggcattttatcacaaagccatctaaaacaaaagtgttaaaggcacaatgctgtgtttaaaaagcatgtacttctttaagagctcaaatttaaatatataatacaaacttaagatccaaggaagaaaatggacccaggacacgaagagaagttaacgccacaggtaatgcagatggccaagagatgtgtgaaaaagataatccagcctcaccaacagccacagaattgaaatgagatacctgtttctgcttctggcattgggaaagaaagaaaaatggcactagcagccttttttttttttttttttttttttycccaaaaaatttgctactcttgaggttctgtcaaaraatgtgctgtggcctctaraagcatttttaaaaagagactttcacaagtgattgtgcaaaattgtgaggtcactgaataggtgtgtatcctcctaaggaggtagcgttggaggagctgttcttgttcaatttactcagcacctgtgaagaggcttcactgtgatttgcctgtacaggtgtgcaggtaaaaatctaagttccacaggtagtgcaaaaaaatctacctccctaggtacctcgtacatttatcacagtttcctggtaaacagttctgctgttgttgacaaaattttatcagaaacattgcatactcttctctaaatagtagtttccctacaagtggctgtcttcagtttagtcgtttaagttatgttgacataaatgattatgtgtgtggcaggggcttttgcgtaggttgttgaaacattgcaccttttggactaacagtttttaccaaaataggcagaagtgacatttgcagccacagctgtgtggcattgagcgtctaaggtatgtgtaataggcagtgtatcggtagcattgataccttggtcaacaccagtaagccatgtaattgcccagaagtgggctctaacactagttttaggagatgcagccaaaacgacaaagctggaggcctctccctctgagcttggcctccacttggtcaaaacagtccccagtttgtccctacgggacacaggcctgccttgttaggaaatcagcaacatttaggagcccacaatacctcacataactctgtgtacagtaacagagaatggaaatagggctgtaagcatgaacaaccagtcaagttacaaatatagaatactctctcaattccactttagttagtcatggagggacagtgtgagttttataaacttataaggaatatacaaacagttccaaatttaaaataacttgaagtaacttttaagtgtgtgaaaagaatatttttttccaccctgtccatttaagcatctgtgacaggcagtattaagtgatgggtgtctttacgtacacatgcctgttgctcacagtactggggaagagttgcaaaatagtcacccattctgcagtgatttctctcttcttatttgtgaaagactcaaaaaaaaaaaaaaaaaaaaaaaaaaaaccaacaacaaaaaaaaggccaggcacggtggctcagacctataatcccagcaccttgggaggccaagtcaggtggatcacaaggtcaggagagcgagaccatcctggctaacacggtgaaaccaaccccgtctctactaaaaatacaaaaaattagctgggcgtggtggtgggcgcctataatcccagctactcgggaagctgaggcaggagaattgcttgaacccgggaggtggaggttgcagtgagccgaaattgtgccattgcactctagcctgggcgccagagcaagactctgactcaaagaaaaaaaaaataggggggatgtgggttgtgagagcgacactgtgtgtccatgcgtgaagaaacccggctcatgatgacctcgccccagaacgccgaagcagggccggtccagcctggatttcacagtgttcttcattgcctttgtccttgattttttgtcgttaccattataacttatctctctttcccaaatgtataagtaggctttgaatatgagtttaaaagaaagaattcggggatgatttcagagtacactagaatattttttaaaagaatattttataaaaatacagtgatagtaaaagaagtagaaggccaaattcygcccccagccccttcttaatattggactttattcctttgcttttttcccttgctgccatctaaggaggctttctgtgctatagcatccagttcctctgccaggcatttctgtaaagatgaggcaccttccactgttttattctccatcattagagcacgtgtcctgctgactcggagcagaggggaggcacacgggggtgaacattccctgacagattggatgtctcttaactcttttttcctggtatcaaagaatggcacaatttagttgatttgatagcgttaccaaatcgtttttcctttagaatgaatctagaatgcagatagattctgaggtccagatgggcctctctccaccaacctgtgaccagtgtacctgtgattttatcactgcacattcatagaaaggttacagggctaatcttcccgtgatatgaatcatgaaagtcaaaatttatgaatgaaaataaraaggaatgaagtactgatatatgccacaccagagataaatattgaaaacattacctatgctaagtaaaagaagccagtcacaaaagacactacctattgtctgattccattcatgtaaaatatccagaataggcaaatctatagcgacgaaaagtgtaatagtgattgcctgggaaaggggcgtgggaagcatggctaacgggtattgggtttttctttggggtgatgaaaatattgttaagattaattgtggtggtgtttgtacaactctctaaatatactaaaagctaccaaattgtacactctaaatgggtgagttatagggtatgtgaattagatctcaataaagctattgtaaaaaatgtgtgaaggaaggggaagcatcctataacctataccatcccaacagcccagctagaggacgattcctgagcctccttctcagcctttgtgttaattctttgcattgatgacttctctctctttacccttactaattagctctcaaaacctctatttaataatgatgctatttataactttcctccttctggtttcttgcttgccctttttgtggtgtttgcttgtttttcttttttctcaatactctgcccagcgttgcgtgttggttccggagacttaagtgatccagtgggcactgtcaggcaattatttcttttgctcattaattaagtgttcacagatacattcagcagccaaaccttgtggcatgccttctgtcccagacagtgagaatctacttggaacttggatatttctgtgagccttgattatatacaccaccaaggggatggcatagaactaagttttttcttcttctccacaacagactttgttctttaatttcacaagcttgacatagcctataagacatcatagtggtaccatagacagttttcccttgatgcccatgggggatttgttctgggacctcccacagataccaaaatccacaggtttatcagcaagggtcactgctcaattgcaacaactgaagcagaagctcctctcatcagaggcagttactgcagcatgttctgtagggcaaatataaccatatgtaagtgactgtgctatcaggagacagaacaacaagacccagaaagactcagtgacccacagagccagttccacccaaacaagtcttastaatgagattagataatgagagtgtattttcttcatcaattcatgtagctcagcaaggctggaaactgcttgcacacttctgcagagaaaaaaaaaagttccatttgctggaactcaataaataaagaaggccttagtgggtacgtgttatctccttagcatcacctggatgcctgacccttttccagagtgtcatgttgcctgggttttgtccttcagtctaagtgatacacctcttagtgtggcggagaaaagggtgctgtatttcttcctgatggatacatgcttaaatggaaaagtagcatgagatgaactcccatagccccttccttttattatttttaaaatawtcattcatttatttatttatttttgagatggagtctcactctgtcacccaggctggagcgcagtggcgcgatctcagctcactgcaacctccgcctcccgggttcaagcaattctcctgcctcggcctcccgagtagctaggactacaggtgtgcccaccaccacacctagctaatttttgtatttttagtagagatcggctttcaccatgttgaccaggctggtcttgaactcttgacctcaggtgatccacccgtctcggccttccaaagtgctgggattacaggcgtgagccactgtgcctggccggcccttccttttagacaatagaaacatgctgcaaccacataccaccataaacacggtgggggaagaggctgcaatcaacagtcaggaggatctgggttccaagcccaggtttgcagtgtaacagctgtgtgctcttggtgygaacatttggtcatgtacaaatgaggataatgatactgcccccttgtgatcattagggggattaaattaaatgcagaaatatatgtgagatgcttaatgtgttgtaaggcgcatggaatatatttagtgaatattaactgtatattaatacaaagtcctgtattcagaatctccagtataaattacatttatatagtagagatatgaatagtttttgtgaacaagaagacctggaacttcaggtgactagaagctcagagtgagccagctatgtttgatgatagttattcttaagatcacacagagaaacggcaagcaagctgctttgggcaaaaaagagcatttctacactgttcagactgcctctgtactgttagaataggtctagggcgtgttgcgtgagtggtgactgagtaagatgttcagagggaagccgtgaccgtcatcttggaatattgtttgaaagtctgacctgtacaaagcagcactcacttcccctgcgtgtcagacacctgcatgagggctggggagggtccagtacaggaaagcgcatttttaatatgtgtatggaggaagttcgtcaagatgggtgccatctggcagtggagtagcacttcctggaaagtaatgagctcccttggactttgtttgaagagtcacccaggtttttgtaaagaagtgtttcagatcagtatgcaatggatgactgtaaatttctcttcagatctaagaatctgtgaytggatgaaagggagaaaggactgcataagtgcttgttgcttgtaaactgggccaggtggatgtcatggccctaggagcttcttgcctgcctttgcatgccataaagcagtcctgcaacccagtgtcacctcagagggatgggaatgtagaagaagagagtgaatagggacagtgatgaggggtgaaaatatgtaactccttgccccttctgtataccctagtacattaggaagttcacccttgtctaggcttcctgttaggaagacagcagactcaaaatggagtctcaacccctttcaaagactgcaagatctccttgtacacactggacttgggagaaaatgagagctttcaggcctgctatcttaacaggttcagaaaggtgtggtccagccccctgactaaccagccctgctgtgcacactgagaattctgctcaggtgtacctttctgtgtgctcctgggtgcacccccaaagtgctggttctcttgaaaacctttttatttaggttcagacagacaaactgtggtatcttccattctgaccataaagtgtttcttctgggtctaactactatagtgggatattttctctagaacaagaggttgtttctttttggcattgagaaatgttgccgatgtgattttcttttgtgaacgtttaagacacagcgcttgccacttgaactttcttttgccgtgcgtagctgattccacataatggctgcagctccaggcagaaacctgtttggaagttgttttaaactcttcctggaatctctaggcagtggctcagtggggtttttttccaaccattccttaggatgaccagaagcttgacagaatcctcttgtcttcattttgagaaaatatgtctttactgtgtgtatgtgcagcatttggttttacctcgtgggtctaagcattttcaactaagcttccttttccaacctagcagacttgtttaaagaacttcaaactaatagccaagctgtaatacggtggctctctcagcctgagaagcctgtgctcaccgtcactctcttcttccctggggtgatagggatggggagtagtgtgtgtgagaggacagaagcgaggattgattgaagattattttacgaggcgagagcatggtggcacacctgtcagctgagtggactcagcgcctgccccggctaggctgtcctcctcctgtgccagccgtgggttccctgagtccctctgcagtcattcatgggtgctgaaaataaagataccctttctgtcgaaagtgttcgccgggctgcctctgcctccctggaaaagcagcagggcacacaggcttcctaggcagcccctgagggaggggctctttttattgtcactctggttagtttgaagaccagacagaaggcagcaaaaaccaaccctttgttgaaaactctttgcctttaggcccttggtaccatgttcatgaggctccagataattccacaaatacattattattgttacctagacttggggacagagaagggtgaaacatgggtctgggaattcacagatgaatatactgtaatcccctcgagcacatttcttttaaaggaatgggggtattctaaaggagtgaacactccactggggggctgctaggcccctgtgaacggtggcagccttggccacggtgtgtgctgtgatctctcctgggtcccccgggcatcctcagacctcccccacacccaacccacagtcccttctccatccatctgctgaccacaccccaggatgtttccagctcagatcacgcctgattgcatccacacaaactgcacgccaggcatttccgtttggatgtgtacacaaaaacaacacgtcccagactgagctgatctttctgtacccctcaaaagaaaagttctgtacccggccaggcctggtggctcacacctgtaatcccagcactttgggaggccaaggcaggaggatcacgaggtcaggagattgagaccatcctgggtaacacggtgaaaccctgtctctgctaaaaatacaaaaaattagctgggcatggtggcgggcgcctgtagtcccagctacaggagaatggcaagaatccggaaggcaaagctggagcttgcagtgagctgagattgagccactgcactccagcctggtgacagagtgacactccgtctcaaaaaaaaaaaaaaaaaaaaagaaattctgtacccttccagatggtcctggacatatcttgaatctaccctgcttttcctcatctgcactgctgtcctcttgatctgggctactgaggctagaatgcacatctgatcatgtgcctcctgcttaaaatagtatttttcctcttaagagtagtccaaactcctattgctggattaaaaggctgttccaggctctccctacctcagggcacaccatctttcctcccagtctcccctcccctctgtctccagtgcttccatccttcagtcatgctgaggttgtctttgttacctttgcttctcttggcccgcactctctgttggctctgccagcatccctatgcacctgctagctcctactcacttgtccagctttggcctggaagtcccttcccctggcaggcagccctaagctaccctttgcttgctactggctcatattctcactgcttgtcctcaggctgtgagccctgggagggctgggctgagtccccgaacctgccacgtctatagggtgtaacctacctgaggcctgactgctaaaatcaaaagaagcctttctcatttgcttagctgagctaagtcctttctggagaagaatgcccacgtcctgggtggacttctgttcggcctggggcaggacgctgcatgtcagttcacctagagcccctcgcttgccctcacccctctccctttccttctcctccccgtgttgtstcatggtcagttcctctcctggcaaggcaagagaatcataaaatctctttggaccatgtgtctctctgatgcactttggaggttgaagctcactttcgtgaagttaggagcggttaatcctcctgcacgaggatgcatgcctgctagggaaagcctccctgcgtttatatggaacagtggtgtgtaccttagggcaacccagaaacagctgagatggccctaaactcttccgtattttgattcagaagctttaccttatttgaacatctgcagaataagttctttcctttagaaatgattggggataaaattgtttgcattatgaaatattgtatggccaggtggcccctctttcatgttttgttccttgtgaagaggttgagtctcctattttttttttttttttggagatagagttttgttcttgtccctcaggctggagtaaaatggtgcaatcttggctcactgcaacctccgcctcctgggttcaaacgattctcctgcctcagcctcccaagtagctgggatcacaggcacgtgccaccacacctggctaatttttgtatttttagtaagagatggggtttcgccatgttgggcaggctggtcttgaactcctgacctcagttgatctgcccgcctcggcctcccaaagtgctgggatcacaggcgtgagccaccacgcccagcctatggtatgcttttaaaaatggtttctctgcactaatgattatttaaaaaaaaaactctggcaagaacaaaaacaaatggttttttaaaaactctagaaataatttgatacattcraggactctggagagggagagagttaaaggctgatgtgtgtgactctttttcctctccccccaaggaaaaaaaatgaagagaaggagcttttaagtgcagtgcctcgtttttatgtgattgcaaacctgaaccaatccttttagtggtggatgtgggacatgttagcttttccaacagtttagatgggcctttgtttttattgttggtcactgtaagaattccaaggaatagaaggatctcatgggcaaaatcagtttgcttttttctctgtatatttgttagtttayagcagcttctattttcctcctatttttaaaagctgaaatgcctttaatcgcactcagtgtgtttattcatggaagccagagaagagggtcccttcctttcccccatagcgccgtaattggaaatttggtagtactaggtgaaattctcagttttggcgctcgcatggaacagccatccatctgctggcgagacacactgcccggggcttttcaagaaatcccttaatggtcctgaacactaataatatttatatacattgagatgagacaaaatttacagcgggctctggggctggctccaggactctctaatcccacacttgctcrcgttctcttgcttgcctcctagaatcctttcaggttgtgcttcagtgaggggagcatggtgtccgtctctgcagcaatgcttatttatgcagttcgtcctctaacaaacagagcaactttccttttgaccttcccctcttctccccatcacattccattgctgcccccgcatagagcatgtgcttatgcatagtttgcatcatttaacacgaaggaaccccttgatttgtgatccctttaagaagttgctctgtatataaagaaaatgatttttcctggttggttttactgaagttccttcagaaatagctcccaccaccgaaacacacctgacttccccagcctgtgtatcggttgtggcacggactgactgactggatggtataatttcactcactcctttgggaagtttcgggggactactgctcagatgtgtgggaaatgcggaatatatctacaggtactttgtcagtttttttttttcttttctttctcatcctggaaaatcccggcattgatatttaggtataactatttgcaagcaagtgcagagggacatttttctgttcttttcaacgttcttattactactgcattaatagctacttgatcttaatgtctattacacatcattttatataatgttttctttaaattgtcagggaaagggattctgcaagtagatgttggtccccccagttagtgtctgatgatgatggtaagattctcagagtttccttcctctaatgacaaagcatggtgatggtgatgtctgaagagcagcctcggtgctccaagatgggtgtatgcttaatactgctggcacacgcctgacgagcgggaatgtgagcgttgtttctgtaaccagtttyactgaacctcacagatccattatacgacgtgaattttgtgggaataacatagrctgggagtctgctctcttccagcctggtccctctcttctttcagccctaccctctctgatcatcatgtcccttgcactgcggccaggtaacctttctgatacgaaggtctgggcatgttgttcccttgcctaaaactttccatggtttcgtattatccacagttgggctaaaccctctgggacaggccttcagtgcctccccgggcagtggtccctggccttcttcagtaacacccaagcccttgcacccacagtgacctcgttgcttttacaagcatttacatgtgatgttctttattcctcccttgctcatctttccactttcaactccacaaaaccgtcctcggcacccagaagcccaggaaacaccaggcagctccactcactcccgtacttgctgtgtcgtccgttccctggggacaggattgtcgctgatcctgcgtgcatctgtctggcacacaggtgcagcacacattaaatagctgctaaatgaataaatgaagaatagatggaattatattctgttgtgaccagtttaaaaacatgaaattggaatacccaattgcagtgtttctttagatcttggaccttgaggtgacctctgtaatggatatatttgaaattattaactgtcttcaagtgggggtttgatgagagagagagagwgwgwktgtgtgtgwgtgtgtgtgtgtgtgtgtgtgtgtttacagaaaatatgctaggtttgtacattcaaatttgtgttatcctcttcaagaaagtcaccttggtagacagcatatatatcccaacattttaggaactcataaaatgcatacttttttggtgtgatcagagatgggtaactccttattacttgtgggttagattagtttttggaaatagcctggwgtcattgagagccaatcyttatcaacaaaatggcataaatggacaggaatgggtttcttcttcactttagagatagctctgaagacatgtctcagttgggattagttcagttgcatatatgaatagcagtcattgaaacaagataaaagtgtatgtctctcacatctaaagaagtctggagtaagcagtccagggttagcctagcggccccactctcataagggactaagttccttttatctcgcttcaccattcttgatgtttcgccttgtggtccaaggttggtacttgagctccaagcattactactgcattccagccagcaaggaggaggatggccatgccctctttgttctcaggagtcttccaggaagttccagtcacaacgtttgtttatatctcactggccagaacttaagtcatatggccacctctagctacaaggaaggctgggagatgtagtctgtaactggatggccatattatcaactaaaaattactgaaaatgacaagaagaataaataatggaaggcaacctgttgtttctgtcaaaggatgacttcaaaagagaaagttgcaaaagtatttcaagcttgacagtatcatgacagttttcttcagaggtgacgctattcatttgcatgtccaagttctgatatctgttttcaagttcacctatttgcagcgaaataggaactcttggaggcaactagtgggtgtgtaaaccggtacaaactttctagaggacagtttaacccaacaagatgaattctggaaattgatcctaatgaaatgttaagggtgctcatgaagattgctttgccgattgcaataataaaaagtaaagaaaatatcttataattggggacaggtgtaacttatgatacattccacaatggagtgtaatactgctgttaaatgtttgtggaattcacaatcttttatgccaaaagaaagctttcagaatggcttgtcttttttgtagatacttgtatttatatgtccatgcacatacataagaaaggmccrgggaaggtctgcttgaagatattaataaaggggtcacttgtgggtaggtggacttacttgttctctatattctctttacttgtttgtgatctctggtttttttaatcatgtatttttattacaagaaaaaacaaattctagaatctccactcaatattgcatgtcagagtcaaaaagatacacatttaaataattttgtattgttttccaatttgaggataaagtaggaaatgtataatgcaaaccagatttcatattttgttgatttagacttaatttacaagtaaggctgacagcccacagagtgtgatcacgacagcattgttatggaaataaatgccagctcatgcatttgggatgtacaccatggatctgtggttattagatactgatttcactttagcacacgaagaggcttagcggaggtggcttctaatatcctatggttctgtgggctcggagatrctactcacccacttgtcagaggcattgaaaccagagcaactgcatcttgaataggagctaggtaaaatgaggccgaattcccagacagttaagacattctgagtcacaggatgaggttaaaggtcagcacaaaatacaggtcataaagaccttgctgatctagcagatgcagttaaagaagccggcgcaaacccaccaaaaccaagatggtaacgagagtgacctgtgatcgtcctcactgctgcactcccaccagcgccatgagtgtttacatgtcatagcaacatcaggaagttaccctatatggtctaaaatggagaggtatgaataatccaccccttgtttagcgtgtcataaaaatgggcaaccagcagccttccaggctgctctgtgtatggagtagccattcttctgttcctttactttyctaatcagcttgctttcagtttacagactcaccctgaattattcttgcgtaagatctaagaaccctctcttggggtctggatcaggactcctttcctgtaacacacctatgttcttggacttaagaatgaccctcagacatggtgacttctttgtcatctaacagctttggcttatttgaggtaaaacctttgatatctaaggcagcagaaatttccctgaagtcattttgaatggtatcatctttactatagtgtagtttaatcattttcaaagtaagcatttctgcacactaaggctttaaaagagttttcagtaaggaacatatttgaaatggaaagtgagcagagcacaatgccttttaaattactgataaaccatagagttcctgtagggcttccactggctgacccacgcctgaggcaaccctcaaatgtgggtattatccccctcattttacagatgggaagagagaggatcaagatcacagaagctaatggtttgtcccagaccaaacaaggagttcctaggagagactgaactttaaagatatcractctctgcaggtctaagtggatgaaaggacagtggtgggggtgaggatttcgtagtgtgtttttgcattgtctcctcaatgagtgatctggtgctggtggtagcagtgaatgacccagaaggatgctggccaggcccagagaaggcggtgcctcccctgcccggtctcatctccgtctctcctctctctccacagtgtgcccaagcacgtgtgggaagcgggcgtgcaccgagaacaatgagtgctgccaccccgagtgcctgggcagctgcagcgcgcctgacaacgacacggcctgtgtagcttgccgccactactactatgccggtgtctgtgtgcctgcctgcccgcccaacacctacaggtttgagggctggcgctgtgtggaccgtgacttctgcgccaacatcctcagcgccgagagcagcgactccgagggrtttgtgatccacgacggcgagtgcatgcaggagtgcccctcgggcttcatccgcaacggcagccagaggtcagtcgcggccacacgtgtggtcactacccgccccacctcacccgccaccctagcacacaaaggtagactctgtcggttgtttcatccgggtgcagccctcaggaagttcactgaggtgggtcattttgagagggctggcttaccttaaatgtttggtgagattctaggaacaattggcatggcttaccgcccccctcaccagtttgttttatattttaagtgcatactgcctggccatttgaaattaagtacttgcttgctggtttcgatacccagagttcatagtctctctgggtacttgccaagctgccatctaagagacagggaactgtagttttggattttcctagtctgggtgctgctagccaggtgaggctttggaagtgcaaaagaaaagacatgctaagcccccaccaccatccttgagaccagcaagcggacctaaacatcttagtgcaagagctagcagcagctcagagtaggcagtagcttaaaataagggacatttttccatcagcacttccttcctctcatccccctctaccttgaccctccctcagtgctcatcatgtccttcattttccttcctgaactttgagacttcacttgggaagcaaagaagttccttatggccaggcatgtggctcacacctgtaatcccaatactttgggaggctgaggtgcttggatcacttgaggtcagagtttgagaccagcctggccaacgtgatgaaaccctgtctctactaaaaatacaaaaattagcacctgtagtcctagctactccgaggcaggagaattgcttgaacctgggaggcagaggttgcagtgagccaagatcacactacttcattccatcctgggagacagmgtctcactctgtctccaaaaaaaaaaaaaaaaaagagaagttcgttataacaaatgccatatgcccttttgtacrtgtcaactggacttctataaatttgtcattggtttatgcttttgaaaataagatgttagcattgtttaaaaatgtgataactataactttgaaagcaaaagaagattggagatttggggttgctgttccctttcctggagcagagtaaagaacttttaggggctcacgcctgtaatcccaacactttgggaggccaaggtgggcagatcccttgaggccatgggttcaagaccagcctgggcaacatgcaaaccccatctgtacaaaagattaaaaaaaaattagtttggcktggtggcacacacctgtagtctcagctccttgggagttgcaagtgggaggatcacctgagcccttgaggtcaaggccgaaataagccaaaatcgcctcactgcactccagcacaggcaacagagaccctgtctcaaaaaaaagaacttttaggaaagttctgttttagtggactaaatgcctccttcatgattagcaccagggggcctgtctttctgagtctgtcaaaatctattctacaaatataaaaatatcgttagaaaagtaggtgttaattttaaatataatttttgctgcagcttatgaagtacattgaggaagtgtttataaagrggattctttttctagtgtattatttggagacgcagcttctactgtaggcttaccttcaaatcaaagataatacattcttttatagtattagatgtagagcaactttctccctcttataatctgtataaccattagsatactaacaacaagaagaaaattactctgaatactttaaaatgataaataggccaaggacttcaatgagctgtagaggatacatattacatccaaaatcagtctaccacattgtactcacattttgttggcagccttcgagtgtaaaagggcttttactggtgcacacctcgggcccaggggcagtgcctggaaccaagttgaggctcagacactattcagacgtcaccttcctccttggggtggggttaggggagtggtagcttgtccatgaactcagtgtgctatcgtctttgttttgtgaatacattttcttaatgacatttggaggccttcagtcgttctgcagccaccagagttgtggcaaagtgggaatgctgtccatttgacagtgttgtttcttccgctctagtgcactcttcagagaattgagccattatttcccctattcattcttacagtccgttaaaaactatacatctacctttttgtttaaaaataaaacaccataaagaataataaattcccttctctcagcctttgaggcttatttaacaattactttgaaatatttaattttttcatcttgtttataccttctctataccatagtggatttgaggaagcttaatctataaacatgttatcaaaacacttccttagaaaaacattttttaagtgcttgatgactcctagactttttaccaaagatgattggttccattttttttttcttttcttttctctttgatagactctggctgtgtcacccaggctggagtgcagtggcacaatcatagctcactgcagcctcaaactcctgggctcaagtgatcctcctgcctcagcctcccaaagtgctgggattacagatgtgagccactgtacccagcttcagatttttctatttgagtgaaagatggagagaaactaaacatacacttatggtacaacccagcagttgtaaccctggatatttatcacagagaaatgaaatttatgtcaacacaaaaatatgtacaccatcgtccatagcagctttatttgtaataaccccaaattggaaattactcagatgtcctatgatagatagttagttaaactgtgggacatccacaccatggaatattattactcagcaataaaaaggaacaaaccattgaagtacactacttggatggatctcaaggacattatgctctgtgaaaaagccaacctcaaaagatcacatactgtataattccatttatgcaacatcctcaaaatgacagattatagccaggcacggcggctcacgcctgtgatcccagcaatttgggaggctgaggtgggtggatcacctgaggtcaagagtttgagaccagcctggccaacatggtgaaaccgtgtctctactaaaattacaaagtttggccagtcacagtggctcatacctatctcagcaccttgggaggctgaggcaggcagattgcttgaggtcaggaggccaacatggtgaaaccccatctytactaaaaatacaaaaattagccgggcctggtgatgggtgcctgtatttccagctactcaggaggctgaggcaggagaatcacttgaacccaggaggtggaggttgcagtgagctgagatcatgccgctgcactgtagcctgggcgacagagtgagaccctgtctcaaaaaaaaaaaaaaagacagattgtagacatggaaaacagattagtggttgccaggtgttagggacattggggactaggttgggcagggcagtgagtatgaacaggtggcattagggagagcttggtggtgacggaacagttctgtatcttgattgtagttgtgattacacaaatctacacaagtgatcagtgacacagcaccacacacacacacacacacacacacacacacacacacacacacacagagttaatttccaggtttgatacttatatcatgtaagatgtagtaaacattggaggaagttggatgaaggctatgtgggatctctctgtaactttctcgtaaatctttgcagctttttgtgactctataattattttaaaataaaatttttttttttaaatggaaagtttatagggtatgtagataaattagaaacaacagaaggccaagtaaaaaagtgctgaaggaagcctctacccaggctggaaatgagaatgttgaatgcaatggtagaggaaggactctccccatctgtgggtgggtccagttcctgtaggacccttggggaagccatgacccccattctcccaaacacacaataggaaaataccagagaagttttgtttacctgttagcttttaaacaaaacagaaccctgcatctttgtcttagatacaaaataaccttcatgggtagggggaagggacattaataaaaagagctataatttacattgtttttcttgaatgtttttacttcacgaaatttgagagatgatttaagaacaataatgtacatataatggctccccagcttaccatcctattacacacacatcgcataagttcgtattatttgtcttgtttggaaatcagtccaactttctgacccttgttctatatataactatrgatcccaaaggttcagctgctgggctagcattttgtctgctatttcctaaataatggtaggtaagcaggaaaagtgccagtcttacttgtccctgactcttggtggttcgtggcatgttcaggatagtatttgaaacaagagctcattacaaagtaatggaaaccccttgcttttattgtgtatgcagcaaaagcaacatttggatcaatttacaagtttctgcaaaacaccgtcaagaaataatttcggttgtgctttagcaagaaaataatggatctgtgctataccacatgccttttggtatccctcactgggctttgccaaaacactgactgcaggagctagactactgttaggcagagacactgcactccctttgctgtccctgccttctctcctagcgactcctccaggtacacaggccagggtcacagtatcagaaagcagctctgttttcctccagaaccccccaagcttcctttctgcagcactgtctctcccacatggaaccagctggctcaccagtcaacagcctatgacacacaaatgccttgaggatgcagcatgtattttgtctggaagcaagcaacacgctcttcctttgtaggctgtttctccttttgcttgcaatgtgagtggcttatcttgggtgggcttgggggtgagataccatgtgaccacatgaacacttcaaaacagttgctttttctaatgcatgctgtaataacaatgaaaagcatatccttatggtttttttaatgcaagaagacagactcaattatgtgtgtttttgattttttttttcttcttcaacagcatgtactgcatcccttgtgaaggtccttgcccgaaggtctgtgaggaagaaaagaaaacaaagaccattgattctgttacttctgctcagatgctccaaggatgcaccatcttcaagggcaatttgctcattaacatccgacgggggagtaagtattccatccccctggaaaaacggctagatctcatggttttcttttgttgatgcttttcatgctcccgtccctgagtcaccactaaaatatgggcttagataaacaacatggtgtgtaagcctcacgcatgacgtctcttctttgagtttccctgaaagataaagaacagattgaaaggcaatctgtcttttagccattggcacgtcatttattcctgtaaagagggtcatcgctcatctttttgttagtcacatcttgcataggagaggcaagccctgacacatacaaaccccagaagagaccattggatcagacgtgtgactcagcagactccagctgtagccaaatccacacatctttcaagtctaaagagttttggttacttgaatttactgagaagactgagcaaagggaagtttagtgatatcacgttaaaattttatgaagtccaaaagaatgctagatttccaaatttacttgtgagagacaaaaggatacaagtgtgtgtcattgtgtacataaagtttcggtctcacccctgtacaatgacctttatttgcaatagatggcattcctggtaagttgcttctragttggatttgtgcaaaggatttcccactgacttagcctatgatctcttcacttctttggttttttgtgtgtttgttttttggttttgttttgagacagggtctcactgtatcacccaggctggagtgcaatggcataatcatagctcactgtaacctggaactcctagtctcaaacaatccttctgctcagcctcccacgttgctgggaccacaggcacacactaccatgtctggataattttaaaaatcttttcacttctgatttttcattgccaagggcttctagtaatggtgccttaaattctctgccactgggaccacttggtcaaggtactgatagttttataagctagaataaatatcgtaaaatggctttgaagttgaaaggaattttggggggggaatccttttatgaagaatttttttttttttttacagtttgagaggaaaaataatgtattttgagaatgtgttttccttaatatttgttaaatgagtagactgtattcttaaggtttagaaaggacagaaacaagtttgtgcttagttcttctgaattmgttgatatcccttgttgctgttcacaatacacccactcccagccctccgtgatggagataactctgttccccacaactagggcttgccsactctcatggtacttctgatgtttaattmttttggctgtgtctgcatttcctcrtttacttttaatttgcttatccctagaacataccttttgagtgcctaaacttttttatcttcctgtcctgaagacaaaaatttaatctgtgaattaaacccatggagaagtatcatttatgaagggattggtacatattgatgcatgatgatgaaatgtgtcttctggtttatgtccattgcaggaaatagattggatttaggatgatgggacatctcattagaggggaaatttcctgatcttgactaaggcatgcttcctgccccacgtttaaaattcaggatctcttccttaaaacatcaactgcacgcaacctctcatctttccaacttgaacttccctttaatttttcttggaaagctattaaattaaattagatgtagggctttatcctttagtacccttattattttatttgtatcaactcaaagcaaaatagagcattttattaaatatgtcttcataaattacgcacagtaaaatcccattaattggaccacacccagttcattatagtgtttattataattttagcattagttgaactgaaaattggtttttgtttactatgagaaaaaggtagactaaacaagatgaaacctgttgtttgcatattatgtttgtacatctttattagcaactatttttccaactattttcaactatttttccaactattttctagttataaaagcaatacataaatactatagaaaatttagcaatgcagaaatgaatttttaaaaatccctcatagatagccattgttaacattttggtgtattttcttcaagtcttagtaaaatggaacctttaaatatagatccctgtatcttaggaattagaaaggcagcaaaggcagttcctaatgagatggagaaaatgttgatttagtcatgcccttgtactgtgggggccatactgtctgttgacagagcatattaaaagacgttccctacattcgtcagccttagctaattggcagtctggtatttatgattttatattttgttaatcagcttgggagctgcagtaccccccagcctcctagaaacttggcttcccctgcctgggaggcctcgttccaggagtcgttgttgagagtcaagccagggaagtgtgtttttgtcagggagcagccagtcctgtgctgggagcrtctcagggggcacctgccgttgaattgttctcacttgtgtttgtaagaatccaagtatgtcacccttacaccaagtgagcacacagtgacacartcccctttcaatgtagataacattgcttcagagctggagaacttcatggggctcatcgaggtggtgacgggctacgtgaagatccgccattctcatgccttggtctccttgtccttcctaaaaaaccttcgcctcatcctaggagaggagcagctagaagggtaagtgccccaaatttcatgagctgacgttctattacaaaataagcagcgtgcttatgaaactgtgttgctgaggtaagagccctccctgccttgttaaagagaagaaaggaggaagccgcagtattgcctgtgctgctcgagtaggtcttgggtggagtcatggttctccattcttaggaggttgctgtttggaaaacagrgatgttatcacccttactggattttgcctcatcagtcaagggttgcgtgtctgactgtgaccagtgagacggcagacgggggtgcrcttagggcttttctgccaagartgacagcagttggtctggagtgctcacctccctgtgaaatcattgttcgcgcgaccctcatctgcctcaggatgctgtactctactacgcacaactgctccatcttttaagatattggaagtgagagcacrggaggagcatgggcggttcgttttgttagaaagaaaccyggattcacgagatggtttttattgattagtttacaggatttgcactattgatagagtttttgccttggcacaggcctgctttgtgataggggttttaaaataaccgtgggcttttcactggaggataaaagccggtgcttattgcatgcacaattgctttccagccgtcagcctgtgtgtacctttgcatatgtacttttctctttaaactctcccttttaaatacgactcttgccaggctttaagtgaatgcttcaaaataaaaggagttatcaattaaagagtgaattccttccaaagagaatttgggaaaataatttaggaaaagaagaggcgagaaggtcatgggaaaggttgtctttgctgatttatctgccccaactggataaagttactgcataagggtttctttacagcctccctgtttttctcagactaactcttggtcagtcttaaattcttaaaattccatcatctgwtagagctaacgagagcgggcagctcttcattccatccttgaaaagcacagtgtcctccccactggggaacaccaatccttaaaaaacttctttctcattgcaaatcgaaggaggctgccgctgcacccagccccagactcctcagtcacttacctggcaagctgaggccctaccagtttaaggtgatgattattgtttcttgtattaaattttaaaatgaatttttctccgctttttttttttctaagtagrtttgtgtttctggaatctcgggtgtctgtgagcatttcttcttcagcagagcagtagctgtcaaattttcttgttgcttaatgatatacttttttgtttctagactaagcaaatgatagacatagaggtgaatgctgagaggagagtttaattaatttccattaggaattattatgtggttaccttttcatggagtsttaactaagtattgtgcacttaaatgtagttagaaattaaagcctgatttttatttgcaagaatatttatgatgtctttctcattatctgaaacttgcataaaacctgaagcatcagcaaaatctttttaaggttgygtgctcaggtgtttgggaggctttccaggtaagcccgggcccctggcctgctcttaccattttagatgcaggggagggcaagtgggccttgggttttccctgctgctgctgctccccagtagtcctgcagctccaaggatgctggctccagcctttcattcctgcgtgcagcttctaagaggctctttcttgagcttgggctcttaagaatcttttacctcccgatgggaagttttctctcaccctgtcttcctggcccatgaccacaaaggtatagcccatcctcacgatgatgagctccccaagagctctgtttgcttcaggtgttgagaccgctagcaacacctcagctgttcatttctccttagactcagggacagagttaggtctggccccttcactagctgccctcacttctgcaagaagggaagagtcagagcgagaaagagaaggacaggatacgatagtcagataaacatcagcagtgcaaagcagaactcgcacagtgatacaagggaaagaaagaaatgtgccctaggcatggagaagagccagatacctgagaagatcagacaggcttctgacaagaggtggcatttgagatgggccttgaaggctttcgggaaaaacttgaggaaagcagaggattgaagtgaagaaaggcaattcaaggtagggtggcaggagcaaaggcaacgagttggggcatcctggggcctgttgggcaactaacactggagaggtgggtggtactagagttatgtaagatgttttgcacgcaggtataaagggttataatttaggaagaccatggaacgtattcaaggcttttgaatagaggagtgttagcagagctgtctgaaatttttatttcggtgtgcttttggtttaagccaagatagctttcatcccagtgtttctcaaactttgctacacattatggaatcattgggggtgggggcaggggtggagttgagaaatcctgatgtccaagttgcacccccaccccaattcaataggagcgtttggggttaggatccaggaatcagtgcttgtctaaagatccctaggcwcttcagcaggcagcaaagattggaaaccactgctttatcccttcatttcttcccatgtgcatatcacaaagcactttgacggttttttttcctaaatattttcccctcacactgctgcctaatgttttagaggttcacccatgttgttaacacgtgtcacactattttcttgaacttttttttttttttttttttgagatggaatcttgctgtgtcgcccaggctggagtgtagtggcgctgtctcggctcactgcaccctctgcctcctgggttcaagcgattctcctgcctcagcctcctgaatagctgggattactggcacgcaccaccacgcccggcttatttttgcttttagtagagacggactttcaccgtgttgttcaggctggtctcaaactcctgaccttgtgatccgcccgcctcagcctcccaatgtgctgggattacaggcttgagccaccacgcccggccttcttgaacttcttttatagccagtgataacataaatgtttccatttggttcaataggatgaaagttctgttctgtagccttttgtttttgatggagaacagaacaattcaaggtacagagatccttcaactctgacaaccttggctttccaaaatgtcactgagatccccctcaaaaagtctcctgagccatccagaacagaaaattcaagcattttacmtagagtagagctcttattcctcactcagagcctgttgacttttatatcgcactcggcgtgagctgattttgtaacccagttacaaaagccatagccatggtttcctcaaggacaccatagggtgtatttctagagtaatgaccttagacattaagaaaatcaagaccgctctgctgtttacaaaggaaacaggttttgtaatccacatgtacacaatttttataaaatagctaatttttaagctcttgagtaagagaatattttcactatctggaaaatccccttgtttggacaaccttgtttcctgatggcatcagataaataaggagttaaagtttcacattatttggtgctaccaaggattgttgccttgaaaagaagaaggaaaaagtagatggagggtggtgagttaaaagaattgaaattcgcggataggcatttctatgcttttgttcctaccactcgactstgcaacacgcagtgctttgtaataccttcttggagctcaaaggtcaggctgaaacatggccgctttttcacatttccctgggacttttggaaaatatacaccaaccctgtgacctagcaattccgggatccacccaagagaaatgaaaacatgcccacacaagacttgtgtatgaatgctggtagcagtattactcataatagcctccygggattcccccgacccccagcccaaaagaaagacccactggaaaccattcagatgttcatcagcagatgagtggatagaaagataaatggataaatgaaatgtggcacaaaggacaactgactactcaacaataaaaagacgtgaagtatgacacgtgttacaacatgggtgaacctctaaaacattaggctaagtgaaaagaaaaaatccagacacaaaagactacatattatatgactcattcgtatgtaatttgcagaaaaggcaaaactatagagacagaaagcagaccagggatggctgcaaggaagaggtggagattgaccaccaatgggaatgagggaactcttggatgatggaartgttctggaactgagtagtggtgatggttggacagttgtgtaaatttacggaagctcatggaatgatgggtgaattttttttttttttttttttgagatggagtctcactctgtcacccaggctgcagtgcagtggcgctgtctcggatcactgcaagctccgcctccgggttcacaccattcccctgcctcagcctcccgagtagccgggactacaggcgctcaccaccacgcccgactaatttttttgtatttttagtrgagacggggtttcaccatgttagccagkatggtctcgatcatctgacctcgtgatctgcctgcctcggcctctgaaagtgctgggattacaggtgtgagccaccgtgcctggcctgatgggtgaatatttgataggcaggttatacttcagaagtaaagctatttttaagaaacacctaaacaaagaggaaacattgtctgaatatctgtatggtgcctggttccacctagatagacatatccacccttgctgaacccctaaggttgatgtaaatattggatttgggggagagtggacatgatataaaccagcctgtttgcagatggattggtgggagcatctgcagaaaggcaaaaaaggccaaatactcttatcagttgcagatggctctgttgctgatgacagcctgtgtcctgggttctgatgccccctagagacagccgtgaagaggcaattttctcctcgaaggaaggaactggaatgattggttgtataattgcagaattgttttcagtatgtcagcaagcactgaaaatggggaaactgtcccttcctacctctgtaggctggagacctcgggttcagctccatttatcagggcacaggaccttcctgttctgagactttgttccaggggactttcacacttcagagaatagcacatgtcatcctgcacttttgtggggtgattaaaagctcacggtatccttttatgtttagcccatccaattcttccaactggcctcagccagaaaagcagggaaggcacccccagtttgcagctgagagactccagcctgggagagctgaataaatcttttgcccagaggggttcctcagtaaatgctggagatgaggctcagacctgacctttggattcccagatggagtgctctgaaccgtgtacctggggctgtcttcaccactcaaatatcgatagagataacatagagatgtcctcaggaagataaccaactgttcccatcctgtgtggtctacagattgggagatagggcctacccaagtgtagaaataaacattttttacaacatagagaaggctgagaaccaggataccaatatcaataaaatctggatatcatagagcacatggaagctaaagaaaaataagtaactggtcaggtgtggtggctcacacctgtaatcccagcactttggaagaccatggcaaggcattgcttgagcccaggagtttgagaccagccagggcaacatagtgagataccagctgttaaaaaaaaaaaagaaaagaaaaattaaccaagcatggtggggcatacctatggtcccagctacttgggaggctgaggtaggagggtagcttgagcctgggaagttgaggctgcagtgctctgtcattgcaccactgcaccccaacctggattacagagtgagaccctgtctcaaggggaaaaaaaaaaaaaaacctaatttttaaaagcattctttgaatgtaaaggcagtaagctaagaaacaattaggaaatcacatttactgaataatttacttaagtaatctttttcttcaggaaacaatgataactttagcgtatgcatattttaaagatgtgcagacaggtctctgccttttaccttctcttaattctcacctaatcatggaaggaatttagcggggagccttgccccaagctgtggctcgaaaaacaagcatggtattgacaggcagctcatgaatggcttgattattattttgacaagggttttatttttatttttctttagcttccacaggctccataatgcctgggttttattgatattggtatcctggctcccagcctcttcaatgattgtaaaaaatgtttgtgtttactgtaaaaagataatcttgcttttcaaagtgattagtcaaatacacagaatttcagtgtgcctgccattcatttgtcaaattcctggtttataattcatgcttcctcccgtgggggagaagaatgttttgttcagaaggtatttttggtgtggttccgttccctgctagtgaaattagtttatgaaaagaggcctggttctgggtgtagatggaagtttggcctgattaattggtccttaccggcagcccagaggtttcttcatcaacaaggagattttgtcctgtaactaactcaggtacctggaagcagcccgacatttgggggtgcatcgctgcagtctcctttggagctggagaaaccyatgagcaagaatgggctwatgacacatccatttccactccatccctccttccgttgtatgactgcatggagcccctctgacctccagcagtgtcacctgcagcctggtagtgagaaacagcaggtatggatggggtctacccccagcaacagtagcgccagctgggccatatcctggcactgctccccaggaaacacaccttgtgttgcattgaccagatctgggatcatttggacaatgtcttatgctgcttttccaggatagctgtgtgttcaggagggagcccttactgaaaggaaagaactgttgacttacaagtttttgctaccggtttggtggtcactaatgtgtccagaggcctgaagatgggcgtgtgaggagsctgacttagcttcagaggctctgtctttcgactcacttgtgtgctcactgcacccctgtgctggcaggactccaacctccacccccagcacttgtgtggacagagagcccagtgctcaggaaagggttgggcttcaggcttgtgatgcagattccgtggtggctctgtgactccttctggtcgttcttaaagtagacagggagcttagatgtcacctgtgcattccccttgttgtcctacgagtgagtaaacagggctacagatagcactaagggatctgcgcatggctgtgcagctcattcatggcatttctggtcctgggtcccagtctctgaactccttcctggtctgacgtccctttgtgaatgttcaggaaaatgtcacagggctgcttggcagcattgtaaccataatttgtgctttactgtaaatgagaatcaggctgaggattgaccagctggttagaggtcctggtttgggtgtaaatgaagaccctcaccagatgcagagagatccccaatggacatagcctccagggcagacgaagccttaggggttctgttttgtcctggctacgctggctctgcagggagggctggggttctttctcctttgtgtgtttatacattagatctgtgagtggatcttagaagtcactcaaagtactgcactgattcccaaacttagtaagaagcagagcaggaagaggagaagaaggattcacggtccatggggatcaggcccatcagcacagaggactcagaagtcaaccctggcattgtctgctgccttcctggggaagccagagagaaaggcccactgcggggatctttctctagacctaagccgtagctgtctgctttcttgcctctccagggatggacttgtcctgccacctgggtagccagatagaacggcttcctgtgctggttggatctgctactcgtgtgcacaccctctggggcagaagccacgtctggtttggtgggctttggtcctccaccacctcactggaactcagcctctcctagattgctggttctccacgtgtggtccagggaccacagcaggggtcagcaccacctgggatttgtgataaatgcagattctttgcccaccccagctgaatcagaagctctgggggtggggcccagccctttgcaaacaagctttgtgcacactgaacttggagaaccactgtgttggactccgagtcctcttgcctggatgagaggcccaagagcactgcatgttagtggctcttcctyctcccccacacctccagggactggagctggggctgctcagaatgmaagatgaatgggggagggagaaggcccrgggttgaccccccacaagcttgtctccctgtctcatgctgtctcctatcccatcatgctgctgattgggcaggatttacttscatggataatgggagactttagagcaaagtgtacgctgttccgattgggtagcagagcatgtctgttctctcatggactgctttcaagcacgttgtacatacttggctgagaaaaataaccaaaggcatttcttgggaatgattctagtaacatcctctggtacaagaagcattatttgatggtaatagtggtcatagaattaattagcatcttaccgattttgatatgttatccttgaatcatgttgctgccattgttaacagcaactgtctgttctcctatagtgttaataactaaatctcttattggcaaaggaaatgtattgtggagcaggtggcaaagaggacctgtgttacgtgrccagcaggctagaggggactgtggccaagggcaggtgcgctaacatcgatttctgtgcttctaggaattactccttctacgtcctcgacaaccagaacttgcagcaactgtgggactgggaccaccgcaacctgaccatcaaagcagggaaaatgtactttgctttcaatcccaaattatgtgtttccgaaatttaccgcatggaggaagtgacggggactaaagggcgccaaagcaaaggggacataaacaccaggaacaacggggagagagcctcctgtgagtgacagcatccaaaacaccrtgggcccaaccatcatgataacagcagaccctcctcccatgtgtgatggcagctttcctctgcggcccctcctggtttcacatgggggaccactagaccatcttaactagcactttgctcctacttatatgtcatcacaatcagtagtgggcagatacgtgatgtattcgtatttataaattctgtacatctctgtgagtgtgtgaaacacttataagtaggttctcaaactttaaagtgctgcttacagaatgcacagttaaatgtccttttatacacaggtgcacagttagatatttctctttcttttttcttttcttttttttctttttttttcttttttcttttttttttttttttttgagatggagtctcactctgtcacccaggctggggtgcagtggcatgatcttggctcactgtaacctccacctcggttcaagcggttctcatgcctcagcctcccgagcagctgagattacagacacctgccaccatgcccagctaatttttggatttttagtagagacgggatttcatcatgttggccaggctggcctcaaactcctgacctcaaatgatccacgtgcctcagcctcccaaagtgctgggattacaggcttgagccaccatgccctgtccgattatttttcagggaagagccagtgtgctycagccctatgagctctacccttctgctcccacagaagggaagcacaggcctgtggggtggagggggctctgccctaagcgcagcccctgtgggccacgggtttcctgtcccttacactcggcygccttgtttctcccaccccaacatgaaaaagatggagtgagcctgcagccctgagttgatattgctttttaaattgagaacaatataattacagccttgtactgkttataaaactttaaggtctcrtatcagagatacagcagtgcctttctcatctaaccctgtgtagaatacggctgttgagaatggcgtggctctctggctggatagggttataaaagtaaatcgtcttttcacctttggcttttaataagggaagggtattagaaaaaaagtaatttgtatgatgaagggtgatttgtgcgtgtgtgcagacagacacacatgcrgrgaggcaaatcagaaccgatgcgtgtttggctttggcttgtttcgctggtgtctggatttacctggcgacacttgttgctctgggggatcttagagggaagcacgctgactgacctagggctgaacagcaggctgacgaccagcgccgcctcccgccccctgctcactctatccctgcaaagcccctgccttgctccctgttcagatcatagtaaaatcggatgtatccgagtatttcagagtgcttgtctccttagagtcagccagtctgacctgtcagatcataatacrtagtagccgtttattttcttttgaaagcaaaatcatggtttcctctctaaataacacttcagcaggaactgtgacatttcccaatctcagttgcgcacattttgtcctaaagacttcttagctcttttactgtcttcagtccctctgcttcacctcttgagtgtgtagtgggattcaggcagataagagggcgaaaggacaattcgtcagagagctctgggtctccatgagggtgggcagtcatcagtctttccctggtccttatcgtagtttgaatttggtccaaggaataagagagacacttggcacagcttccctgccatacccgccagccaggctacttcccatagagcacgttaggcttggccaagtgagatcttcttgtcagtgcttaatccagcctcccgttgtttgtcagccctagctggaggcctcacaggagttcctgtgtccttccagtttgatacsaagtttagaccaagaaaagttcctttctgtggcacacctgtagtctcttacctgtctttggtggttgtacacgaacaggcagatatccacaactgcagaacaagtgtcatcgtctctcttaagaagtttcagggcagcctaaaggctcaccttcaccctaccaggccccctttcatagccaggatcttagggatggagaagaaagataagttcrcctcgttcactgaagtcgccccttgttttcaggttaggaaacccaggttcatgtccaagtccctgggcaagtagccagcgtaactgattgacctaaaacaaaggatggagcccttggrgctctgcatagtgaaatgtatgatttcttagtggaaaayragaaagccactgaggaagcccagaagggaacttagcatatacagccagctttggggaagggggaagcagtgccaagcaagacaggtgcttttcagagacacatgaatctctgtcactcacggatgtactctttgcmccaggtgaaagtgacrtcctgcatttcacctccaccaccacgtcgaagaatcgcatcatcataacctggcaccrgtaccggccccctgactacagggatctcatcagcttcaccgtttactacaaggaagcgtgagtttctgctttgggtgatgccattctgttgacagggctacgaatgggagaggccagtctttcgatccttgaatgggctggctgaatacagggggtcagcagagtccccagggagagccacgccaaacatccctacttcatcctcatgcaccctctcgggctgtccctgtgatgtcagtcacagccagtgacagccatgattgggaaagtgttagctcgaggcctgtcattctttagtgagtgattagagrtgtttgaataaaataaacccaaaatggggaaagcttgytttttccagaattaggtcagtccagactcatgaacgatgatgggggacttcactgaaatatcgtttcagcctccttacctactaggcctactccaggaacaccctgcaggcacgtggctcttttgtatcatcttattcctgtctctctctctgtgtgcctctcccaagctgtggccctctgctctaggtcatgagccttccaaacaagcgaagaaaagtggagagagaacaaccttcatgtcttgagccttttgtgacttctcctagactctgttgggagcttttcctgtgtgatcacatgacattcmcccatctaagcagccgaggcttattcctcccgactgcagccctctttgatctccctcttccttcctttgccttctatatccaggtggctaccccggtctacttagccatcccccttacccaggtcccatgttaatcccatagttctctctcccagatgtgtggcttccaaagagcagcaaccagaggcaccttatgacagcatcttgtactctttcctcctgccagagctggggtcctatgaatgagaaattgggtacttaggattactaggctttcagagtttgtacacaggggagcccctcatgatctcccatcccatgacagcagacggtgttttgttcatgtttgtttcagaagccagcggccagcagctgtccagcccttttagctgataaatataaaatacctacccaaccatgcatctgtgcgaagtactatattctctgatagtcacaccagtgctttggcaatgtcagctggtaatttcactgaggacttgatgctggtttctaaggcaatctggaaactaaatatttgaatattataagatgcttaagcatcagaattgtttatgagcaatctgaattttagaagctacttctgtttgtctgtaggaaagtcatttttctccaacagttaccttctttcaatatctgatatttgcattaactgactatgcttgtttttttcttgatgaaaaaatgctgcaatcagaagagagaaaaatagtttttgcatatgttcttaaggaatagtaactattgaatcccagtaactgttgaagtggctcttcctgaggcagaccattcaattctgtaatgcccgactggggaagcccagagtccagtcacttcatttcttcttctataraagtctaattgaktatttgtttatttagacctcccattatagaaagtgtgacatgctgggcctctggggaagatttttgagggttttgatgtcagagccccgaacttyctcygaayttaattgtctttcagaccctttaagaatgtcacagagtatgatgggcaggatgcctgcggctccaacagctggaacatggtggacgtggacctcccgcccaacaaggacgtrgagccyggcatcttactacatgggctgaagccctggactcagtacgccgtttacgtcaaggctgtgaccctcaccatggtggagaacgaccatatccgtggggccaagagtgagatcttgtacattcgcaccaatgcttcaggtatccatgcctagacaagcccccagcatccacacttcttcrcaagctcactggccttgcttgtaccaggtgtcattgtagggttagcagtgagctatgcctgttgtctttcttgtcaataggtaatactgtgtcatattcatttccccactgctaacacattaggctcttctgtgccattttctggcctcggtactatcttccatcatctcctgctttgtgcctgtgagcccaggtcctccagggtgctgggctggtttcattggaaggcccagcctggaaacagccgtcttcagctgcccttgtttcttgtttgttttgatgttcaatcctccaggaactgaaaccatgctgatctgtgttccacttaattcatgtagctcactggttttccatcttcattctggagcttatagagttccaaagaggtcaacaaaagttgaaagcctgcagatgtagtatgttgtggatattcagagtattcactgatgatgaggttcctccttcctttatctttaggttctaaaccatctcatttctcaactccagatctggaaacagtaaaagcaaacgttaatagtttccagtatataaaaactagtttagaagtaggaaaatccacttcagttttaaagacactgattgttttagtgtattggagcttctatcacaaaaaaacagtgtagcctgggtggcttataagcaatagaaatgtatttctcacagttccagaagccacaaagtgcaagatcaaggcgctggcagatttggtgtctggtgagggcccactccctggctcatagatggctgtcttttcattgtgtccttgcatggtggcagggatgcgggagcactctccggggcctctcatagaagggcctggattccattcatgagggcttcactcccatgacccaatcacctcccaaaggccatgcctcctaattccatccccttaggggttaggattttgacatgtgagttttggtaggggacacagrcattcactctatagcactgataaacattctttgataatagccattattttagtgggtaaggtgtttttaaatacccataagcgagcacaaaatcagtttaaatggcagagaggagggtgagaagaaaatgctggtggggaaaaccttttgctgtgcacgcctgctccttcctccactcctaccccatctccatgaccctgtaagtggccacagtcatgtcactgggtaaagtgcttattraaacaaaattggcacaggcttctgatcctgcgtgtgggttggtgtagcagaggttcagtgcarcagaagaagtttttcatcttaaaatttggaagtaacccctggccagcaattcactgtagtgtttgggaaacataggaatatctgcttattgtgacagattctcaagaaacctgtttcctttccrcaaagatggaaaccaggcactgtaccaatgagtcagttcactacgttttgtcctctgtccttacacgcagcggagacagacgagaacttggtcctctgcctctgctgtttggtgacacctatcgtaagaatgtatctaggaatgagctgtttgtttttgaagtacttatttttggaaaccctaaagtggctgagcatcaagtggttgtgttttctctgaaaacgccagtattagtcataacctttttccaaagtatcatcccttaaagatgttcagaaccttgtgtgtatcgtataacctggagcaccctcaagctgtccgcccttttcaagttttaaaaatggcttaggcaaacatattgcttaagygatatccagtgaaggtgtcycctgtgctttgaaaaaccatcaacattgatgcttttttgtgacccaataaggacaagatttcagtggttctgggatgcatttgatctttatgcacacttcagctctgggtttcagttcaggggtcagcataagtaaagcttgatcagataactrtgctttgcctataatcggcattcattctgctggtgacagagtcctttgctcaaaatgaggcttccatgcgtttgcagttctaaactgcttttcagagtcatgcctcagtcattgtactgaaggatgcctgtggaaatggtggacttccgtgttctttgcattgcctctcccccatccctcttacacacagctgtgacatgggcatgcacactccttcacacacacagactctccagscccctttccacttcctctttccatttggcttcatgacatttttatcagagattcaaaatctcagatgaaatccaagtcagcctgttttaccagttgtcgaaattgccggagtgcagcactgtggagaatggcagttgtaataaatgagaaataccaggtgtttgaattagctgtagattttcayattgtctcttctaaccctgcttgtgcccccgcagcctttttccatttacaactcagtaatgtttgttttcacagagattaccggaggaaatagattataaagggaaatgttggcatttatagtagtactatttcaaaataaggttcacttttcactttgtatttcattgttcattgttattttcttatccaggtcaaactggcagtttcctgttggcttgccagagtatctgatagcctgactcttaagttcatttcattttctagaatgttctttgttcccctctccagttccttccattcccttggacgttctttcagcatcgaactcctcttctcagttaatcgtgaagtggaaccctccctctctgcccaayggcaacctgagttactacattgtgcgctggcagcrgcagcctcaggacggctacctttaccggcacaattactgctccaaaggtaagggtgcagcagcggcctggacggagggtgtgaccgttcattcctgtggttgtaatgtgcctgagccctaatattacacgtatcagacaacagtgtagttctccattggaaaccagctatcttctggttttttttttttttttttgagacagagtctcactctgttgcccaggctggagtgcagtggcacgatcatggctcactgcaatttctgcctcccaggttcaagcatttctcattccccagcattccgagtagctgggattacaggcatgcacyaccatgcccagctaatttttgtatttttagtagagacggggtttcaccatgttgcccaggctggtctgaaactcctaacctcaggtgatttgcccgcctcggcctcccaaagtgctgggattatagccttgagccaccacatctggccgagaccagctatcttcttgattaaaggtactgagagctattatttttccttacaagcatgtataacggctttcattcccactcttgttttggcttttcttttccgagaagacaaaatccccatcaggaagtatgccgacggcaccatcgacattgaggaggtcacagagaaccccaagactgaggtgtgtggtggggagaaagggccttgctgcgcctgccccaaaactgaagccgagaagcaggccgagaaggaggaggctgaataccgcaaagtctttgagaatttcctgcacaactccatcttcgtgcccaggtacccagctcatgtgaaatttcakttggcaaaacccactgctcaggccggttctgttgcctttctccccaccaggtagtgtgtaagtcagcagctggggggtacaatacagtagccactgagacggagccgaaaaagatgacaggttcggtgaagtgagtccctgcggaagccagtcagccctgaagggaacagggaccagggcttgggttgctggggccaccggtgtgacaggtactgctgtctcagccacaaccccccacagagagcaggtgggcaccctgtggtagaggcagggaggggaaactcaaagagtattgacagctgctgcctggtgagaggaaaggccaggatttgggtccatctctgcccttcctaattatctttactgcctctctcagcctcacagaggaggagtgaagcaagagggaaaaaagtcagagtctgtgctggaaagggcctgacttcaaaacatagccaggtgccacaggcatcctgtacaagtaagtttgggaagcagtgtagggcgacagcctgcattggctgtttattccgtggttactctgtctttcaaagcaacacagcccctgccccagggactctgctcctctgctgtggtcttggtttctggggagtggggacaaaagcagaggaaagtaaacgttcatagcaggactgttcatagtagccaaatctggaaacccagtgtacatcaacaggtgagtggctcaataaaatgggctcgaaccttacagtrgaatattattcagccataaaaagggaggaaattttgatccatgtcacaacacagatgaaccttgaagacaccatgccaagtgaaacaaggccagacacaaaaggacagatagtgtatgattttatgttgtgtgaaatatatggaatgggcaaatgtatggtgacagaaagtagatttgaatttaccaggggatggggatagagtgtggaggggaatgggaattattccataatygataggttttctatttggagtgatgaaaatttttggaaatagataatgatgatagctgtaccattctgtgaatgcaattaatgccactgaattgtacccttaaaatgattaaaatggcaactttttatcttacatatattttgttttgttttaaaattttattttaacacaataaaaaatgttaaacaatttttttttcctttcaaaaaaggattagcccagtagtgtgtgggaaaggagatggaagcacagtggtgctccctggccccctcttcctgtaagattatagtgcagattttggaaacgacctcatgcctgaaaactaggccaaggagttggatttaaatcagcatggcacccatgagctgcccatccgcagtccccacagcacccgctgccagcaccccacccagcacgttcccttcccctcactgcccccgaccctgagaggagcctgtagcggctatttattccacagtgactctgctcttacaggctttcttaggctgtaacaacaaatggtttttaaagtgattttttttttctgccaagtgacctttttgatatttgcaaaatggttgaaatagctatctcacttcgagaaatcagtaaagtgggaaataaagactggttagaactggaggcattatttccttttgagagtgcgcctcttcattgcttggtggcttttttctcctcccctcctctctcgaagttcaaaccaccagagcagccaggcgcggtggctcacgcctgtaatcccagcactttgggaggctgaggtgggtggatcacaagatcaggcgttcgagaccagccgggcatcatggtgaaaccctgtctctactaaagatacaaaaaattagccaagcgtggtggtgcacacctgtaatcccagctacttgggaagctgaggcaggataatcgcttgaacccgggaggtggaggttgcagtgagctgagatcgcaccgttgcactccagcctggacaacagaacgagactccatctcaagaaaaaaaaaacaccagagctgtgagaagggcctgcgaggccctcatggcctctcctagcctgccccgctgggggagtcttctgcctgctggtgtgtggcagggctttgaatgtgaaccttgaggttcagtgcccaaggccattttcttatccaggatatctttgtatcactggtggttcctagaaagcagaaagtttgaggactagaaagattgcaaagaggtttggaaactggaactcaatgaggtttggtgacttctctgacatcctaattaattaagaatccgtttgggacctggtcctcattcccacacaccgactcttttccccctcttctcctccattgcgttgcttctcgtggtcctttccacctagaccagcagaggcttagctcgtggcagctcctgctgcccgccacacggaaggatggatttagagtgtcccaaagcaggctgggcgggaagtttgtttttctctatcatgggcccttggttacgttgctgtcttgttccaccaaccagcaggaggttygggttgtgagtcaaggttttggaaagattttgctgaaaggccccttgctttcagttgtagttacgaggcaagacctgtttttttctcatcagatgtggagcacaaggtgaagtgacgtgaaggcagagctgtgattgacatgttattaatgcacagcattggtggtgttgggttcaaaacaagtttcctgtgttctactggagaagtgtgtttatctgtcccccgagtccttcctttctctctcctaagacaagtccaacttgtgattctctgttttcatggatgtatatgaagacaatattttgtccgtggtgagaggccataatttttaagaagttaatatttgtttttttgcctcctactgagttctggcagagtccaggtgaaggagtgtccagcagagagaatgactgaatcacagaggctggctttctgttttacacgtggattgtccgaaaatggatttgatttctttcagttcattctgagaacaatgtatttgtgggataaaaccagttaagtaagatttagttccttataaattgtccagaatatcctgtatgttttgaagtacagtggaagctagagtttgtaaaacttactagtttctgaagtcaatattcgcagtaaatgcctttctttgactactgtctttattttgtaaatcacatagtttggtttaactagctaaaatgttgacagatgttggaaagtaaaaggttttccaatagggctaggttgtattatgggatggagtggggaaagttggcagtaatgtttgcttttgggcgtacgatttggaaatgtagttgtttaccaaaaaaaatgatgtatgggccattgtgcttcccctgttcctgccttccagataatgttctstgtcacctccstccccttgtcactgccttgatgtcatcagcattgagagctgtgcagtccctaaaagtgtgatgttgataaacaagtaaactactgagtatacttcatgaagtaatcccagttaaatgggggtgggctgagccgggagaggggttttgacagaattattttgcggtacatcaaacctaagcaacttctgacagacacaagtgtatgttgtgttggttttgaaggtaggcaggaaatttgttgatgatgtgttgacaaagatttccctgacagtaaatgtggtttcttgtgtttttcccttccgggaagcttggttagctagttggttggtttgcagagtgtgaggattgtggatgatcagcctcatgtccttacccttcctcccccagtattgtgaaagcaaatgtacacgccctgaccttgtggttttctgcttgttggaacgagcatatctgtgttgggcagttcatgccttcggtaggacccccgtgtgccactacacaaagaaggaccgtgttttcctcaggggaatccatgggctgagaagactggggagcctcagaggccctttcccraagccctctgctctccccttccaggttctgasctaaggaccagccagaagcctgccgagcgtcagccgaacctgcaagtggcttctgggctgttccgttccctgcgtgagctttccctctctgctgctgctgccgcgctctcccctccatggcactgatgagcttcccacattctggactttctcatttccctgggcagatagaattcatcccatttgccccctgccttttgcctattcctaagaccggtgaccccagccgaaggcctcagccctgttttctcaccattcgtccatggctgacctgagggttgccctttctccatctgggtgctcctctcgtattctgttygtttttgttggttcctgtaaacattagaattctgttttaaggtttctagggggagccacaaagcccatttcttcatatttgaccaaagcagcaattagagggtcrcaccctcatgcctcatctgccctttttggtgagaatgtcctttttgtgatgactttatgcactcccttttgcttttcggttgttccaagccccattcaaatccatgacraggactctgctctctgatgggcaggaccttgatgaggccacaggtgctcactgctgagtgggaggaagcctgggtgggctccagggacctgcagagtgtagcaagcacagacgcttggggttgggggtgggctcgcagcaggagcccccaagaagagagagccctggggtccgtggaactgcttgctgctagactccaggcatctttatttccacagtcagagcaaatccaaggagccaccaccacaggctttcatatccctctgccccaggtctctggggcctctgccacacacctcacctctcccctcctgccctaataaatcttaaccacagctgataggtttgccacctttaaggcttaaccataaggtctgtgaccagatggcctgagtgttctgatgacacagccaggactgcctggccaagagtggcagagacactatttgcctctaggtaaaatcgaagaaccactctgagagccggggggtgggggtgagagtttgtgtgcccattctgacacttgcagagtagagaaagcaagataatgaggaaggacatccctgtgttattcatgagttcttacctaagggggctcaatagctccttctattccayggttaagattcttctgttactcttactcaagtcatagaaaagacaaaagaggtaaaagtacttaaaagccacatttctctcctccttgcagacctgaaaggaagcggagagatgtcatgcaagtggccaacaccaccatgtccagccgaagcaggaacaccacggccgcagacacctacaacatcacygacccggaagagctggagacagagtaccctttctttgagagcagagtggataacaaggagagaactgtcatttctaaccttcggcctttcacattgtaccgcatcgatatccacagctgcaaccacgaggctgagaagctgggctgcagcgcctccaacttcgtctttgcaaggactatgcccgcaggtatggtatgatccagctggccccattgccaccttcctcacaacctagtggagaagatgtgttttatggacacagggtctgacacccagggccatgacccttagacccaggcctgcctgctaaataacgtgcagtcattggcaggtggcgtgtagaccagctgcccagggaacagagcccacgctctcctagtgacaccactcccagcttggtctctccatagaaygtgctgggagcagggagctgtctgcagggtccaccctccacctgctacttggtgcacatcgtgcattcctgctgtcctttgccccctcttgcgcacaaatcgggttgccccctcctgagctctcacatgtccagagatgtctccagttagttgccttgatccagagtaaacattgcccctcaagatcaactcctggagyagcctctggtcttgcttatttagtctttggctttcccttgttgttagacactgcctgtcacycgggcattcatccatctttgaaggtgggtgccttcaaagacagaacaagarctgccctgtcctttagtaggcctcaggtggtagaaagagcacggaggtgaccagagtctggggtgtggggtcctcctgggtgcagttctggcactgaagtccattgtagcgtgccttgaggcagtcgtcaggctccctgcctcagtttccttagccctcctgggagagacatagccagctaacccctcaagtgccttttccggctgtaactttccatgacctttgcttatcacaactttgtttactgcttcaagaagcaaaagcaagaaaggaaccactgcaaggtcagccagccgctggaggagttggtgccggcagggagggcttgccctgctcttagcaccagcctcctagcagcttcctcacaggccgggctcggggccatccttcgtgcctgcataaaaattgcagttgccgcgtgtagacgcgggccacggagggtccctgtcacagccggcaggccccgtgtcctgcttctgcttactcagcatctttccagggctgcttgtgtttgatggcttcacaaagctttcttttttcaagtggtaggcacagggtagaagaaagttacttaggttgccaagattttcctgctgtgcttggcagcaggctttttttgttgagggactggggagaaaggaggatcttgtggcatcttgagacgtgcaagttttgtggttggtgtattctgaaccctcygctgtgtgagcagcccgctcaggggcagtgtacgtggctgatctccactgtcctgcccgcgtggatgggggsgttattctcagtgtacgtggctgatctccactgtcctgcccgtgtggatgggggggttattctcaggtcagcccagtgttggcctccctccctgggaacccaaatccaactttgtcacctgtttaaattgtacagaaggagcagatgacattcctgggccagtgacctgggagccaaggcctgaaaactccatctttttaaagtggccggaacctgagaatcccaatggattgattctaatgtatgaaataaaatacggatcacaagttgaggtaggactggggcagtggcccgtgcctgcatgtacttccatccattgacagcatatgctacctgactgcacaggttacctcctggttagcataggacttaaaacaataaaatccatgccaagttggtgaggatttgggtctttctacccactctgtactctccaaggagtactgcatagtgtgcaaagagctaggctgctttttgccctcaagaaacgatttcattgtgtaagataaccttgtggcataggccaggtcagttctaataacttttaatccttctggagttcttggttacaaaaatgtttggttaaagcttttgggtgtgcttaaagctacttgaagacgaccttttaagatttgatttctttgtctttactgacactcaggatcattgttaggtgggaggtcagatcaggcagctggagtccccagtgtggtgagtttagttggcaggccccagattyctcctgcattcatgggaaattgacatgtatgttttatttccccaggatcagcgagaatgtgtgtccagacaggaatacaggaagtatggaggggccaagctaaaccggctaaacccggggaactacacagcccggattcaggccacatctctctctgggaatgggtcgtggacagatcctgtgttcttctatgtccaggccaaaagtaaggcttgtggagggagamgaaacgtggtaaaactgaaagcagggtggtccaggatcaggacagcccgagtgttcatggctgtcttattttctgttaaaatggagttggccagcttccagaagggtcatgctaaggtgccggcacataccggcactgtgtgtgaaaggttgggcagggcagatgccgagctttgggctcctacctcatgtggcaggaagggagaggatccgagcctctcctttgaggttgtgtaaccactggagagccagaggagacagttgctttcaacctggcttacattcaaagacttttttttttttttaaacaaaagacattttataaagcattgaattgaccattccacctcctacttggtcagtaaagctagatagggctcggattcagggcttgaaatcctaaggggtgtaaggaactccagaggtcatctggttcagcctgctacagggcaggaatctccacggtagcatcgcagaccctccactgtccttttaaagyccccacatgcattggaaatgtacggtgctcaccctttggtacagagactgaggaatgtgagtttatgctcaagtcattaacaagacagaattcttaggctgttctgtgtgatgacttcagattttaaaacaaattataagatgtataagcgcaacaagggccacatacttgttgtttgaccaacaaaacttagtattttggtgaaattagttctgtgttgagtttctgttatttcttatttcaaacccagtttttaagattatttcatgttcatggaatgggatcaaatttggcataacacataaaatagcaatgcagcctcacttagtggtaacacttttgggtctagtgggctgatctttcctggtgtccacatttctgctactcacatctggagttacgttaaaacatgcactccgccgggtgcagtggctcacgcctgtgatcccaacactttgggaggccaaggtgggtggatctcttgaggtcaggagtttgagactagcctggccaacatgggtgaaaccccgtctctactaaaaatamaaaaattagttgggggtggtggtacacgcctgtaatcccagctacttgggaggttgaggcaagagaatctcttgaacctgggaggcagaggttgcagtgagccaagatatgtcactgcactccagcctgggtgacagagcagaactccatctcaagaaaaaaggaaaaaaaacaaaaaacagcgcactcaataggtccagcaatctcacttctagtatatttccaaaggcaatgaaataggtatgtcaaacagctctctgcactcccatgttcactgcagcactattcacagtggccaagacatggaatccacctgatgtccatcactatgtatatgaatggataaagaaaacctggtacatatacattatagaatactattctaccataaattagaaaagaaaaatgtcgtttgtggcaacctggatgaacctggaggacatgatgttaagttaaataagccagacacagaaagagaaataccacatgatctttctgataatgcggaatctaagaagttaagctcatggagagtagaatggaggttaccaggggctgagggtgagggagcagatttggggagatgttagtcaaaggatacaaaatttcagttagataggaggaataagttcaatagatayattgtacatgatgacagtaataatgakgtattcttaaaaattgctgagacaatagattttaagtgttctcaccacacacaaaaaaatgtgatgtaatacatatgttaattaggctcattcagctgttctacaatgtatgcatatttcaaaacaataygytgtacatgataaatatacaatttttatttgtatattaaaattaattaattttaaaaaagatctccagtagtcacctggtcagcaccagatattctaatctgtttgtgatatctgaaaatcctaatacagacagcaaaagcaggatggggtgaatagaactgcaaatcttgagccaacattttatgtgcctggcactgttcctgggttcaggtttttaggggtaaatggatgtttaggcagataattttgtcaattaaaatagtctgaattgttccatctagtccagttaacctagtctcaccagttagtctatgccacctttgcagcacccagaagcttcataatattcctgcagccttgtccagggtagtggcttgcttgctttctrtctttccccagcctccttccctcctctttttcctcccctccatctcctagaaacagatcctagtttgggggtctgtgatctgtgaaacagcaaccttggcttctggggttgagtgaactcagcttgttttggtgacatgacatgttcctgtctgsctttgctgctccatttttaaccttgtaagtgccaggatgccagtgggaaatcgggagtccttctgatagaatttttccagcagatgttatcacgtactgcagggaaattggatctgcgtgctggccttactgttgagaaatttttccttatgtcagacaagactctgtcctgctacagtttagtctcatttcctcttatttaatcctcagaggagatggaaggtttggaagctttcaggcaactgccttccttttaggaactccttgtgtgcctgaatactattaaattactcctcagacttctcttttccagatgaaataatctcaggtcttttggccttttcttgtagcccaatatcatacaccagtttcctagccatttaatcatttttgttattctctggatgtgttccattttctccatgtccctgttgaaatgtgaaactcaaaaagaacacagtacagcctgaccagtagtataagtgatataaacagtgatataagggccttgggggaagaaagaaaaatctgccagctttccgttggtaatgatcacctctgagtgtttttaggaattgcaaaatgctggagcctgcatccattttgagagctacaatatcaataaaaatayttctttcttcgattaaaatacttctmattttaaaaattaaaatagctgtagtagtctttaaagagtaaccatgatcacagttttccatggcaaaataatcattgataggggacttacgattaatgtttacttgatccccagtgattccaggcccatttccacatagacatctgtatttggacgtcccagagaggtctcagattccttgtgccaaaaccaaaatcacagttgttgccctcgaaaggcctcttctctcctttgctccttagctcagtcagtggtcttgtaatccatttgttacccaagccaggaacctcacagcatccttcactcttctttctgttcagccacccctttttcattccaacccaagcctcatggattctgcctcttaaatgtctctggaatccagccctctgtcaccaccagcaccgccacagctcagactccaggtcactcgccttggggggatggtakgagctgtcatactgtatgagcctcatcctggggccatgacttaccaagccagatcatctctgtgagtctgcctggtgkaaagacaaggatcagtgacttctttgtaggtctgaactgggtaatgcagagcatgccctggagacatggcatgtccccccaattctccaagacatgacagtgccttctcttactgccaggtccctccgtctgtcctcagcacagccatttccctggaacgcgaatctgatcagttcactgctgggcctgaaagctttcgctgactccttttaatctgcagaatgagggtgaaactgcttagcttgggctgggtcccttgkgagctggccctgacttctctccagtatcatcattttctaggaaagccatttccccacaacccccaaggaaagcatatcataaacaagttttcccttggrgaggttccctcgactcccttctctcctctcccttcctctctgaattgttgccatatgtgaagtccacttttctagttgtcatgctacctgttgacactaatttcccatgtcccacagaatgttccagggtatgggtccatgtgcctggtgcccagcctagcatctgccatacaagtgctggttctgatgatcagtggcttctgtggtcttagacttgtagcaggactcaaatgtctgcagcggcattggaaaggggtgccgtccagtgtgtgcatgtgtgtgtgtgtttattttaaattgtctrtggaactatctcaaagattgaggccagcaggacttgacctatacatagatgtagactgtacatagatgtaagaatttctattcattttatgaaaatgaatagaaattttcattctatttattagaaatagaatgcttgctgctgcaagcatttgagtccttttacaggtgtgagatcacaaagaccgcttaccaacagaaccaacacttgtatggcagatgctaggctgggtaccggggacatggaccaaaccctggaacattctgtggaatgtgggaaattagtgtcaaatgtatgcattttcactaacagtcattaaactgygtacaaagattatttttcttcagtctatcattgaaactattgcaccagaatatactgtactttaaaaaatgagtatatgcctcagtctgcacatatttactcttttttcaaataattgtttgtttgccgtgttctatttctgacaccatttaccttcaggaattcttactgtatgatggggagtaaacgaatatacaggtatttttttcatacttccaactgaatgtgaagaaatgaaaygagcaaattgttcacctggtgatattttatcatttcctcctctttgctgcagcaggatatgaaaacttcatccatctgatcatcgctctgcccgtcgctgtcctgttgatcgtgggagggttggtgattatgctgtacgtcttccatagaaagaggtcagtgatgtgcaragttatgacactttctgtggctgagtggtttgatgatttgaatgtgagtgaaggtgatatttttgaagatttcaaggaaatattttatggactggaaaacctgattttcccatcaaatgttcttccaggaaaagagaaccttttctaatgattttaacaacagccaaaataatttttcgatggtacagaccttcccctggctgkcttttctggtatacagatactgctgctggtgcatacttttccaaacgcgatgcgctagccttcccaatcaaataagcctttttatttccaatgaagtaaagaaacagatgtttcttaaaaagcgctaatctcaggctactgaggaagccagaagatgtgttagcaaatgtctgctggctcacccaggcctgaattgggagtgtagacaagagctgctgtagacagtaagctctccccattctgttctgataccgtgtgagagaggataaatgaaactgttgtagcgaagatgaaagtatwtacaggaatgtatggaggtggggttttgttaacgtgaatttaatctttttgacagaaataacagcaggctggggaatggagtgctgtatgcctctgtgaacccggagtacttcagcgctgctgatggtaagagtccgggccaccagcactgccagcgtgcagggcaggtagatcgggagctttcaggagggttgctartttgggaaaggaaggaggtttgcattattttgagctacctttggccttggatctgtcttcattaatatttctttctttctttttttttttaatcaaagtttttagcagttcagtgaatatgtcaaaacttgtgggactgtrtggggtgccccaaggaaacacaggctttagagatgaatgtggccagcgcagtaatcaatttatttaattgcttgagatgttatgctagaatgaaaacagctttttaattgttaacatctagtcagaggatatgctgcagctgacaaaacagtccttttaaactagtttcagcttgagtatcatctcattataattgtctttgatgaattacagctctgcttttttttttatcatggaatttttctgtcattcccttccgactagggtcatacgctcgtggctcattcacattccccttggtaataactaatgagggccattcagttaagtggctgggaaggtctgacrtggaagttgggtgatcctcaatggttatttccttttttgctctttctagcatttttatatccagaccttttgagtgagtcggattagggtgaggggttggtcactgagtccagtgatactaggacccttaactggcactttgctaggggcttttacaaacaccatcccatttgtttcttaaacccctgcaatgtgcgttttcttaatgcccatctgcaggtgaggaaatgaactctgggaaaaaacttgtgcaggctcacatggttagacagttgagaagtcaggaggagaatggaatcactgtggaaagggctgtgaggtcccccgggcaggcaaggaaacagccctcaggaggggctggaccggattcatcaaatgaataataaataagtgcatgatgttgagtgagtacatttagaaaaagtgtttgctgtcttcttgcctcgggagaagtgaaagtagatgcaggagatgtgaaataaagagacatgattattctaattattgtgatcaaataagaaaacataagaaaatactttaataatgtgaaaacaccgttatactatgtagggttttactatggtttctttaataatttctaattcagtttatagtaaagtcaatcaaaagcagcctcctctgaatgggaatcaggtgcagaataatgactttatttctatctacataaaggtctcacaaagttggttttttaatagtaatatatatatacatacttctgtagtgtgtgtatataaggcagagagaacattctggacggatgcacaccacacttacaagagttgttacttgtggagaggatctttccctttaaaaaaaaaaaaagccagatgtggtcgaaggcacctgtagtcccagctactcgggagactgaggtgaaaggattacctgagcccaagagctgcagtgagctagaatcccaccactgcactacagcctatagagcgagactggctcttaaaatccagcaagaagatagatatgcattgtttgtatgaataatagcttctaaaaagaaaatcagtaaggaagggagtcatcccagatgatggaattgatagaacaaggcaagaccactttcyccctctgtgagggtggactgtgactctacgagagaagctattctgctttgaaatgcggcactagaggttggygtgtgtagcttttgactgtgaagtgtccaggaagagaaagcatcaatacaacaaattcagattctcagggctctcatggtgacttgaattcacattttgtgtccttctagaatgctttcatgatacgtcttggtacttcattacaacaaaaacaaacttattgccacccaggtcgacaggtgggaacagtgtcaccttatttgaacttratttattcggcctttgagaagcacttatagccagtttcctcraggggcaacaaaatgacattgcagttcaaaagtgctttaaaaacttctttttcccaaagctataatctgcatgtcaccattctccagagtacattgaaaatcccctacaggaaagtgctgataacattgtgcacagaaaccrctcctggctggtggcactggggacgcctgcttaaagtcggagccgttgggttgaatcgagagaaaaggattgagcgtattgacttcagggacctcccagggaatgaatgtgattggtttcaactccatgttttatggcaggctaaacagttaattctgattaaaagcaagcctggattctcagagataaatggctggagacagtgaactctttacactttctgaggcgcattgtgaagagccttatctcctgggttgtcttgcatacttactctcctctgacaagcacccgcctcttcttcaggggtgcaagccacctatgccagctggagggcagagttccattcgtgaaacccttgaaacataygtactatgaaatacaaaaatgtgtaggaaagaaaacaagattattaatgaagttcatattggacacccctcagaggtctaaaatgatggtgcccctcctgggcctaatttataataaacatctctcctttgagacatcacttaaaggttgatagttgggatatggagatgttaggatacagttgtcagcctctcacatccagccacaggcccagggtcagcatctgaaagcatgaaagcaaaaacaggcaccttctccacctcctttctgagccaggaccacctccttcccacagtcagtgtgtggtagagcctggtggcaggtcccgtcaggcaaggacattagcacacagcgtcagaggaattactgacatttcatatggatcttatggaacaggttgattttattttcgtttttaccctacccatttggaggtgtagaattgagcctgtgtttggttttgttwtctttctttccaacctttttcctttctttctctttgttttgccttccttcctgcatagaaatatttatttattcattcattcatttttttgagacaggttctcactctgttgcccaggctggagtgcagtggtgcagtctcagctcccwgtagcctcaacctcctgggctcaggcgattctcctgcctcagccccctgagtagctgggattccaggtgtgtgccatcacacctggctaattttttaatagagacagtgttttgccatgttgcccaggctggtctcaaattcctgggctcaagcgatcctcccaacttggcctacgattacaggcatgagccaccgcacacggcccatttattttcttaaaccagatcgaatctaaacagaaacagaaactggagaagaaatcctattcaggcttggtatctactgtgcattcctcccaaatctctacccattggtcaaggtccctgagttcacagagcccaggccagagccctggaaacgcctctgcycgtccgctgcctaattgcctgtccacrctgggcaccaccrggtctctccctcagtctcagagctcagttgcttctgcacctcatcagggatccagccatcaaagccaaggctgggggacacttggrctagagtaatcctaccaataatgcagttcagctttgtaaccgcaaattttctagtagccgtattttttaaaagtaaaaagaaacagatcaaatgcattttaatagttttttagttccaataatacgtttcgtgtaacccagtatatccaaaatatccattttaacatggagtcagtattaaagttacctaaatatttcactttttttttttttttgtctaatctttgaaatcccatgtgcatgtctcaaattggactggccacatggaatgctcaggagtcccatgtagggaccagctgccatgttagatagcccaggcatagcatctgtgttgagggccctgacacctcttttggattcatccaagaagtaggaccttacgtgcaccatcatcacctctcatatgtgactctggcctttttcccgacccagcataagaactcttccctctccctactactctcctcctttttacatttgcgttttaatctgttggtgaagatgggtaaaatcctgcttgaccatttcattcagtttctcaatcccctgtggttaatttgtttttttcaaaaatgtrtttttatgtgatgaaaagaaatttttaaaaaccaactgctttctttcctatactagacttccttgctttgttctggtccttctatctgttagtatcctcaaattatcttgaaatcctcagagatctgaaatactagtactgactgtacagttttcttactcaaatctatagcatgtggaaagttgacakcaagccatgccatcgcctcctggtattctctgtgggtttaaggaagcagcatcttatattctttggcttagagttcccccaaagcacgttctgtctaagggcttgtttctgtacctgctttaattacggtttcttctccagtgtacgttcctgatgagtgggaggtggctcgggagaagatcaccatgagccgggaacttgggcaggggtcgtttgggatggtctatgaaggagttgccaagggtgtggtgaaagatgaacctgaaaccagagtggccattaaaacagtgaacgaggccgcaagcatgcgtgaraggattgagtttctcaacgaagcttctgtgatgaaggagttcaattgtcaccatgtggtaagagaaagttcctgaaaagycaaaatgcagcacagggagagggtatcacacaagcctcccagtatgttcttggctgcatgtacccgtgggtttggtgtcttgcctttgccttctggatagttaccccattacctcactgctaccttcagacccctgtgctcagaccaggccgcagcaccacagagacagttccagacaacacaggcaycagcaagggccaccctgaccctctgagtctttctctttttgattcctcccaggtgcgattgctgggtgtggtgtcccaaggccagccaacactggtcatcatggaactgatgacacggggcgatctcaaaagttatctccggtctctgaggccagaaatggaggtcagttttcatttccaccggtattgcatgttgcctggcctgctctcttttcctttayaatctccctgcaaggaaatgctgtgtctttaaatcagtttactttccagcatccagtgtttcttactgcatgctcagttgtaggtcatttatgcaaaggatttccccaactagagtcagactctgatcttcgtgaggggaacttcctgttccttggatcccctctgctaagcccctctgtgcctttgttcctgcattccctccacccccagtcccctccccacatcagtgtccacctgccaagccaggccagygccactccctccccgaagctttcctgccccactccagtagctatctyctctgctaacttctcgatgcgcttgactcacatcctcgtatgtgttctctctcgttatgttgtgttgtgctgttgttggagtgtgtcccccctccaccccgttgtgtttagcttttcatctcagtccaagtgtgtggctcagggccgcatttgtggcaggcactctgtcaataaatgtatgttacagttcaaggttaagctgcctggattcttgcccttgcatctgggaagttgctgggtgatttcccacccagctcygtgcgcaagatgtgcactcattcataaaccccctccccacacacagtccccttccccggcattgttggcggtccttgtctttgccactgggaatctggtttcctcagactctacgtccacgtttcaggattgatccagagtcagtgtcctgcttaygcttttgaatgaatgatcccacctcagctgcaggatttctgcttagtttcctaaaaatttcactttgggttatgagcttccaattctaaacctgctaaagtcctatgcaatttttcattaaaagtcaccgtggtgtctcccccctctgtagtattaacccacaggccagctttttaacatatgcgggcatgacttttgagtaattaattctacaaataaactgggagataaatgctgagacataaagccagcaagaactgagttttcatttggttgcctccgtgggtctgaagtctttgacccttactttgctgcttactgrgtaagcagtgtgtctgcttttattccttagaagcagtgacttccccttctcggcccctttggaaattcttttgctgttcttcatttgggcttaatttttttttttttttaatgttctttgaatcggcaacttaatcatctcccaagtgacagtttcttaattttagttccaaacacctgttcacatatgacttcatktatttgcagcacatggtgtttggggccaagtgtggactggggcttcaagcaggatggtttacaaaactcccaccctctgttctgccaagcattggtccccagcacccctgggtgttagtgcctcttcctggttcactcactcactttctctggccstctctgtgtctctstcactctctttctttcgagatggagttttgctctgttgcccaggctggggtgcagtggcatgatctcagctcactgcaacctccaccacctgggttcaagcgattctcctgcctcagtctcccaagtagctgggattacaggtgtgyaccaccaygcccacctaatttttgtatttttagtagagacggggtttcaccatgttggccaggctggtcttgaactcctgacctcaggtgatccacccacctcagcctcccaaagtgctgggattacaggtgtgagccgctgcrcctggcccttggttcactttaatacacaaaacagcatgaaggagaaaagcttgatgaaataggtgactggagatctggcagagtatttcttgccagcatcgattgaggcacctctgaaaagtccaaaactcactcccttcctcyccagtttcaggcacagaataaaaattcagaacacatggccttggtcctggctctgyggctggctgcctgtggtcctcagacagcygctgcaggttcctgggcctcagtgtcctcaatatraaataagagggtgggacaagattactgaagtccctttcagaactaaaattcacctttagattggtcagatttaaactttttctttctagctcatgtcargtattaaaatgtgtgcacttaccctgcagtttcattatattcaacctgctcccccgaccaagtttcacttacgtatctcactacgagtaggtgtatatgtatacttgtcttaaatagctctaaccaaattaaaggaaagaatggcagtgtaacaccatgaactgacaaaatttcagccctctgtctttctccatgcttaaagttgagtgcttttgttgattctgttgctcacggcaattataaatgaccacttcataacacatataggtcatactgtaatatttaagaattgtgagcataaactttacatttcatgtgcatatttcctcatgcatcacacgtatctaaagccctgaaaagtagtgatttggacttacccccagtgacttaatgttgcttccccagataaccacgtgataagtgttttaagtcaccaagagacagctttgacagcctgttcagaattcaaaggtttgtgtcaccaagtgtagagaaccaacccagaagtaccgaggagttgttataatgattccaaatactagctttcagtagaaactagcacctcacagggcagcagccagcatccactgggcattgactatgtgccacgcaccactgggcactttctgtgcgtggccccaggtcatcttctcgtcagtgaaaccactgtgataccccatgtggaaaagcctgggcatgctcagctggtggccggcctgcaagtgtgggacctgtcagagccctatggctttgcagtgctgtgtgagatgctttgtggtcaagaaaaccaaggtgtagagtctgttgcacttgtatatgcaaaagtaaaaggtaacattaaaattagggactagtgattgttttaggatggagagacttgggcatgtgttttatataaaacttttttctaaatggatgtattatttaagggtaattctttttaattccaaagccagcacgttgctgtcctctgcaaagaggaatgcttatccctgttacttattcctggtttcctccaagactagtttcagctggacttcagttgccaaggacttgtcttcygtaatgccsacagaaaataataatgccacattgtaaggtgaaaacagtaatcctggtatttttgtattttagaagaaggttgaagggaaagaaaaggattaaataatttataacgatgctyttatgggaaataaaatataccatgtccatttggaaacacatttgcttacttccacacagcctttgtaacgtgctctccttcctcttacctgtacttcggtgatggaaataaaaggaacatataaacaaataggaatttgagtaactgagaatccttactaccaaaaatggcttgtttcactttaaaaaaatgttgccctacccaaaatagaaaatgttggtcctaaagagtgcaaattggtgtttccctcaccagctctgatgtggtcagggagcaagtgcaaataagcttgcggggagcaagcaggtgccatgctctccatgatggtttgttccttccgagcaagtcctggtttcttagcataaacaacccacggtgcccagattgaacaaagatgatatgcaaacctcgaaagaaattggcatggaaaaaaaaaatccaaaattctcatgtgaatttttttaaatstccaacagaataatccagtcctagcacctccaagcctgagcaagatgattcagatggccggagagattgcagacggcatggcatacctcaacgccaataagttcgtccacagagaccttgctgcccggaattgcatggtagccgaagatttcacagtcaaaatcggaggtgtgtccttagctttccaggtctgggcaagaactaaactcaggtgttttgaggactttgttggcattagtctgcccctggagaggttttctagtgtgtcccttgagtgcacggactccttcttgggaatgatgtgattgtctccagttgatggtcacaaacctggcacggtcggtcccaatgctgatagctcatggacatggtggttcagatactgggcacggtccctgaggctggctctccagacgtttgaggcatttcttggtagaacacctcttagcattggttacagaaataattaagacaatgtcttyaggagattttgacttgggaataaarctcactgtccaaccttgcattcatccctccaattttyctagcttttaaggagcattgctccccttccagggacccacattggtttmtaagaggcaagctgccctaatgacgaagcctctgcacggagcaggagcagtggcaggagctggcatggcagtcccttaggtgagggacgatcactgctcactgggtttcacggctggggctggccagcctccaagctctcgaccactctctcacaacacttactgtcctgctcttagctcaccagcctactggttagactcccttgttgccaccacccactgtcacaccagaaaaaagggttggattgaatttctgagcaatggttaaaacccacttcagcctttaggtttgtgtttttacttcggtcttttaatctgcctaataaaaacacacataacatcagggctgctcaggaaaccacctgcttttaccaggaytctcatcttcccactatgatacaatgatagtttagaaaaataccaaatatttatcctgagaaactgcaggggagatttaacacccaaaagaagctatttcaaatggacctctgtgtctagttcttgaactgccttttctggaagtgttcaccttcctttagtaacatatttttttcctttagtagtgatgttttaatgaaatgttttagcccctttggtgaacaatgagaatcttttagagaacggtttctttttttgagacagagttttgctcttgttttccaagctggagtgcagtggcacaatcttggctcaccacaacctccacctcccaggttcaagtgattctcctgcctcagcctcctgactagttgggattacaggcgcgtgccaccacacccagctgattttttatatttttagtagaaacaggttttcatcatgttagccaggatggtcttgaactcctgacctcaggtgatccacgcacctcggcctcccaaagtgctgagattacaggcgtgagccaccacacccagctgagaatggtttctaaagtaggggtgagtgtctttctttttactctgtaggagctagaggtattgaaatggaaccatatcccagagcccacatccctccgtcatcagagttcctcattcaggatccaccagtgtgtccctaggtttggcacgttgagacgtcctcacgtttggtgctctgtgaagctgggcagccctcagagaggcaaagaagtcccaagaggccgtcctgcctcagggctctcaggaaagagccgcccgcgtccctggctgggcttccttggtgcacccagctcatttctccttccctctctgtagaactcacattgtccccrtggaaatgccagccagctcccctttcccagtgcaggggggagccaggtgggcctgaggtgggccagttctgccgctaatgggtgagagacttgggccaggtgccttacatccgggagcctcagtttcctcacctcggaaatagggtgataatgtaacagaccccatggggttatgagaaggacttggtgcaggaaagcagcagcacgtgcctggcacagggcagggcctctccagatggcagttcctgtctgtgtcttattcccaccctccgrgcacatggggggaactcagtttctccccactgcgcrtcaccctgggagaggtgttttttgtgccaattgccattttaaatccaaatcagcagggatcatgtttgctgttcaaccatgtggcatatttatagtgattttttttgtaatcatggtttttctttctggaatttcaagtttttcrtttgtgctgaggaaggtcgtttgtgttttttaataggattccttcttttccaccttgtgcaagtaaaggcaaatcccctatttgcatgtcactgtattaattcacagataacactttcacacttcatttttattcttctcaagggctcaagatgttttcccaatgcccagcgtctcatggatgacaaatatgacaagtaattttaccagaggcagtttgagggctcttagcayagcacaagtaaattatgttggttcaagtccaaggaactttgttctctttgtgtttgcttttgtagccttacctctttggggcatgagttagagacatacatgagcattttaaagtggagcagccctttctcctgggaaggagaacggaagagtccacttaagaaaaggttgtatgattgagtgcaaaatcaaaatctgacaaagcagcaataatttaggattataaagcgagcctgccatcaaacataattatgtggcatcttctggagacatggaaaatggaagaaattttcaaaaatgagtgggaggattatgttgaaaaacagtattgagtaatagcttcaggggcctcgtaaatagcatcttttcggcatcttactgggtacttttgtcatcatgaattgttaccctgaatattttcccccttattaagcagtgaaattatttacttttctccagtggtggggcagtgctaccaagttaagtaagcatctgtactctcctgtttatttggtcaggttttaaaaccatgtgtaaatgaccagtggtctctgcagtactatatattttcttaaattgtgggactctaatttttacaccgcttccttttttcttatttttattttcaagacaggttctcactctgtcacccaagctggagtgcagtgttgtgatcatggctcactgcagcctcaacctccagggctcaagtgattcytccaccttagcctcccaagtacctaggaacrcaggcgcacaccaccactcacaactgactaatttttaaaattttttatacagacagggtcttgctgtgttgcccaggctgatcttgaattcctgggcacaggcgatcttcctgtcgtggcctcccaaagtgctgggattacaggcgttgagtcactgcgctcagcctgcctctcatttaaatgcaataagggcattaacttcctaagggaatcaaattgtaaatatattaaaagtggagattgcttggtatttgctcatcatgtgattaatcatcccttactgtctccaccttataaaattgcaaaccctaatatttggccaccttaaagtgggacgtgtctgtgtcttgccttgcgtctctccacacataatgagtgtagggtcctctgctgtgacagcagtggtgcctgctccagcgtgtgactctgcgccctctcttcccttacagattttggtatgacgcgagatatctatgagacagactattaccggaaaggagggaaagggctgctgcccgtgcgctggatgtctcctgagtccctcaaggatggagtcttcaccacttactcggacgtctggtatgagaacctttactgcattgccagcctggagcccccagyctctgcactttccaccagctcagtctctagggctttatctttctctgttcattgttacccgttgccagctttagctcagtgttgtgtgagccacacttcttcatcrttgaggtgttcctgttgtcagtgggctagctaagggcagaagggcattcgtgggattttaaagaatttatgggaccaacattctttccgccttcagcagataccgattatgtttccaggaggtgggatgtgccagaagccgtcacctctttttgtttctcccctgcctgccttctttctcttttcctctttctcaataaacagatactgtctgtgtgtctgcctcacctaatctaaccctcagattgcagacagtgctttatttagacccaaagcttatgagtcctgattgtgttttcctgctggtcccatctgctgtctgtctttcagtgggcatccaccgttgtggacccagggatggttatgggaagcaaaacgtctcccttaatcataaacagtgtctaccagtggaagcccatcgaccgagggatcagaggcctctcagtagtattgtttattgcagttccttggcaacattgcagagaggcagtcaggttctgaaatacaactgaggttattggcaggctgaggccctggcacaggcaccttctagaatatcagctagtgtcttggctttcctctggggggatcccgttgctgttgtgttacagaaatggtagttgtttactccaacagtctggatgaccgcatagaggaactatttcartagtgactgacatcattttttttttaacctcgtaaacctttcacagttcaggggccttggatcttattttgaagacaggtgcaaattggaaatagcatttgaatatgacccggcaaagcatgattgcttcttaagctcaagtatgagatctgttttgcaatcagcttgtccaagatggttatctcttcactgtcaaatcaaagtgctctgcatggtgtttagagattgggatggtgaggagagagcaagcctgggtatgtgcatgcatctgtttattctaggcttcgtgcctccaggagcttggaggtcagcttgtagtataataaaatagaaaactatacagccggggagaacagaagcagaatagaaggataaagtgttgttcatatctctcrggcaaattttacccaaattctgacgagcagttactgcacaagcaacaacaaagggacctagagtgtgttcattgccaattctgtccatttggctacataactactgtgaaccaatacaaaaagatatgtataaacatgaataggcgtttggtattcattccatgaaatgctcaggcattgacagcgcttcaggttttgtttgctttttaacacaggctttgaggatagcacaggtcaggaaggctagggcgttggagcaggtttctcagcggtccaggctctaaactaaagctgtccctctcaaaagaatggaaatgatttcagattgtattcagcagcacgaagcaatgattcctaaatagttaaaaatctagaaagaaacactaagaattgtattkggctttgtagaagagaccccagaattttaggatttgggatgtatccctgcagtcaggcccagtccccagtgcacctgcagatctttgacagctgctggttgagcttctgctaagaggtttccttccagggactccatgttcactgcctcacaaaggcaggccagcctcatgctttagacatccttgctcttarcaaatctttygtgttctgctacgtcagcctctgtgtgacacccattggaccttctctctgtagcacaattgcataccttgctctgttcttgataagataggtctaggagtcatcgaagaggtgtgtctgttctagccagaacacctccaagtttcctgctgtcttccaggacttcattcccaggcccttgggcactgtggctgctctccctgcagctccctgtagcaccatgtccctctgaaatgacaagggtgccctctaggcatggaggaaaccagacgaaggactggggagctgcaccccacagcctagagctgtgcttcttcccgagcatctggatcacccaacacataatctttattttttattaagaagctttccaaatagtcacaaatagccaaggttatttgcttctttcatgactaattaccatctgtggggaatgtggatttctctgtaggttttaatttgctggtgagtgggccattgctaccatcccctcctggtgtggggaagtatagttactgaatgctgcctccagccagcacgggcattgcagggggactcacagccgccggtcttccccctggggaaacaacgtcaaggttcctaattagaaagggctttacacagagacatgtatctamtgtttgaagattaaatctgtccatgaaatggaagacttgattttatatgaagtcatgaagagccaacaccacatagtaaaataccggctttgaaaaacacagaggtgttgcatatttctcggtgcttctgactggctgtgtggccttggttaaacctcagagcttctctggccttcggttgctccatctgtaaggcaaggtctgtctcgagaagtctgcggtacctgaatagatgttgaaatggctcctgtggcaactggtattgtgtagagatggttcagtgtccacaccttgcagttgtcacattaagctgtgaaggacgactgactctagcactcagtggtcctcagtggcaggtgatgttgacctcagacaagagttgctcaggagataggctttgcagttcacctcgacaagcgtttgtggagagctaggtctgctacctcctgtatcgttgcctgtgggtgatggtaaggctcttgggggtgtggaagatgcggggatgatgatgatgacgatgatgacgatgacgacgaygacagcgtcgtcgtcgtcctggtcctggaaggataaagtcttgtggagaagaggaggcaattctgacagtttggggttgcatcatcttcttcacagaagagatgaagttgtgtaggcaccctaagtatggattgtcacaaaaagagcactaggaagcggggcggggcggggcaggggtggggggttcctggcagtgggaatgctgggcaggcatggcagtagggagcacctgctgcaggtggggttggtgaggtttcctcgtgggacttaggctgcagagagatcaagacaggcctcagctgttgtattaggcatcctggactaattctttaagccctgttaaggtttctgaaccagagggtgattagagctgtgcttgaagttcttgttagccggagtatacagctgcattgagcaagatgttgtaaccaaaggagaggtggtggtgggccaggcaagcaggatcctgcacactcagggagctctgagggacggaaggagggtgccagaccttggacagatgtgagcctgggtggacagttcgcagtgggactccgaggaggccaagggcatgggtgacagcaggcagactgctcgggtggaatgggcatcagctgcagggaagccgggggaagaacagggcacaaatcrgagttcagtgtgagacgcrgtgagtttgtgggtagcccagtaactgggaacttggaatggagcagttgggccgggagggccagggtgggagccgtgccgtgagaactggctgcctgcaagccrctgacacagccaggaagggcacgtggggcaagaggagaagtgggtctgggagggagccacatcctcaggccatttcccagaccagcctgcagtcagcaaaagcagagagctagtcatttcttcttattttatttttaattttttgttgttggagagctagtcatttcttgtaccaagctgcatttcagatgtgtgggtactactgccactggcatctgaggcatgctgcctgtatggctgggctggttgtggaaggcagagcttcccgcacaaagctgatggagagccccttctcccctgggcccaggcctctctaaactgcacttttggcctctgggtgtcttgtacaacatgaagacgacagcatttcttggtcacttgtaattaaaaaggaccttgggttggtctgtcctctgattgctaagattctatttctgtctaacatctacttttagtatcaatttgtacaaaaatctttgattcaccgaaagtagctgaagcagygaataaaacgttctcatacagtcaggagcactgtgggcttgggcacaaggtcwaggtcccaagagctcttggttggaaatctcctgccccaggtttttccatgtggcttgaccagcacctgcagcccaggacaggtccagctagaatccctgctccccaccctgctcccgcccytacttggtgatgagtagcctattttactccaccaaagtgaaccacatggaaaggcacacaggtcagggagaatttgtgaattacggaatttgccctgggagggcacatttgttttgcagattccagcattgtcttttttaacattctgtctgaaagttgtgtgtgtactctctgttttgttttccagtggtttgatcttctaaactggcaaagctgcatgcatatggcagaattgctcactacaaagttattcctcagccaacttctctgcttaaggattctttgtccatgataccccctcccagccagtgcagcccaccctggtccccccacctgtgacacagaggccctgcaggccagcagctccccagctctgttgtgggtgggggagcagcaggagttctcttctcccttggcccaactggacctcaagatccctatagatcttctaaacattccaggtcccaggccctcaccccagaccaatcaaatcagagtttctattgggtgcccagccctctgtttaaaaacctccccaggagattctcctgtgcagccggcagtgagaaccacctgggtagaggtttccaaaattgtctgattgtaaaaatcacctgaggagcttggtaaagcttgactgtcccaggcctcatttgaggctactragtcaatgtccaggctggggcttggacaagaatgtcattctttttgggtcaaagccaggttaggtgataccgccttgccagataaatggccgggactaggtagatgctgaacccagtatgctctgcgttcaaagcacagatcaggggcttcctgaccrtgcaagggatgccggaagcgccctcaccaccttccttagctccaccaccggggctgaatttagtttacggggaacattagcagcaacagagggaggatgatatcccgcacttagcccagggcctggctcgctgtctgacaagyactgtcaccatagtaaggacagtttatctgctcgggatgtaagaagtgctggaaaggagggggcagcattgttcagtccatccctttccaagctcctcacagtttttttctccctgtaggtccttcggggtcgtcctctgggagatcgccacactggccgagcagccctaccagggcttgtccaacgagcaagtccttcgcttcgtcatggagggcggccttctggacaagccagacaactgtcctgacatgctgtacgtacttcctgggccctccgtgctcttctgagttctcttctcaaatacctgttttcttgggtcacaggagattaggagattaaagccattctctctggtcctgcrcctcccttgccaggcrtggctaagaggtttgtccttgtggaaggagctgagtgggttggtcgacctgtgcttttccgtgggtaccttaattctaccccatattccgtaatgctttcgttccgatttgcagttcacactgtagtttctcaggccaaatgtctctgtgaaatgtttggccagagtaatccatccttactcatcctctccatgtgaggtttttgtttctttttaaagaaggctacaacacaacacatactactctgaagtygaattcaagagccccgcgccccacctgtggcaggcctgagggagccgccgcagtgagtgtgcacacagctgcatggccaggactccggcatgcaccacgtagggtcagcttggtgtcttctgaaccctgccccacatgtcttctctgttaagtgtttacaaaagtcataaaccatctaagtaacatgctctccggagcttcatccgctgaccaatgtggacctggagcgtgtgtgagctgacatccctgcggacagaaggatgccagtgctggtgaatttgtcttctcactgcacttttttttttttttttttgagatggagtctcgctctgtcgcccaggctggagtgcattggcgtgatcttggctcactgcaacctctgcctcccgggttcaagcaattctcctgcctcaccctccaaaatagctaggattacaggcacccaccaccactcccagctaatttttagtagagatggggttttaccatattggccaggctggtcttgaactcctgacctcagatgatctccccgcctcagcctcccaaagtgctgggattacaggcatgagccatcgcacctggcaaccccacttattttgaaaaaacactttgcagcttttagtcctaagttttgtcagatgacgagagagagtttgtgatgcctcacagtgttggtgaggcctctctgctcagcgccccctggagaagccccccttttggtggaggacttgctctgtgtccgtggacggtgctgttttgtggctcagtggaggtcagagctgctggagcagggaggccttgttgtccttcctggaatgagtttgaggagggggtgaaggtgttccagttcagtcatcaggygcacaacaggtacaggttgggagcagtggccttgcttttgacatgcactttaaggcaggcttcagagattgatctggatctccatagctgaacaggaaggtgggctcccactagtatctcaagaccaattcaggagatttccagaaatgcttttcaggacaggtttggcttcattttggaaaggatcctgaggaattgctgggctgttatgtctgcatgaaggcacccagctcctatctctcacccatccacccccctggagccagcacagactcaggctgggcccacagtggcgggataatagatagatatgaaccagacatgtgtcaggtggacaggagggaatgagggctccagcagccacaaaagttttgctcatttggtctcctacagtgtctgtgggccaggaatccagatgcaggtgttcttgctctcagctcagagtcacaggaggcagaaatcaagatgtcagtgggrctgcagtctcacctgaggctcagggacatcttcaggctccttcagggttctgcacttgcaggactgaggtccccatattcttggcacctgtcagctggggactgctttcaactcttggaggccaaggccactcacagtccttgccatatacagcctccataggccctctcataacagcagcctatttcttcaagactgataagaggacagctctctactgcttctactggttttttacctgataaagtcagatctacccaggatactctctcccttttaagtgattcacagtcaattgatgagaagcctgattagaggagtgaagtatcctctcatgttcacaagtcccacccgtactcaagtgaggggattatatgggatatttacaccaggggcaacgatcttggggggcatcttagaattccatagtctcagaaatcattgtccctaatcaaacaatcaaggtgctatttttgtttcaaagcactttgagtgttgctacaaatactgaatccctaagctccttgtaaatggccggccagcggagggcatggggtggggaagactggatacacacccctgtgctctgggagtacgttggctgggcggcatgctcattarctgctgcttccgaacataggttcagctgaagtgtatcccaggcagtggacacttcgtgtggaattcagaaaggtggcgcaggaaggataccagggaaagccagagtgaaggcatcacccttgcacagctagcacatgtgggggctcccattgtcccatcaaggcagggccagaaccagaaagtcggctggtgccctgggcctgggccagtgatgggaggctcctcttctctgagggtggcacctacagatgcagtggcactgggtttcctggagccctcatcaaggaaacttcccagcatggcctcttcagaactccacaatccaaacttggaagagactcgaaagaccacttagtaccttttcttgcccagtatagaaattcttcttctccccttctgtgttagttttttatcgcagtataacaaactacccaaaacctactagttaagagcaacagtaaacatgtattatctctcagaggtttctgaaggcgaggaacgcaggagcggcatagctggctggctctggcttggagcccttctcgcggttgcagcccagctgtccgccggggctgcagtcatctgaaggcttgcctgggggaggcagacccacttccaaggtgttgctgcataggtagtatgccctgcatgaatcgccctgttctacgtgggcctctccgtagcactgcccaagtgtctcaggatgtgtagctggcttctctgagtgcagagttcggcacactctttctctaaaaggccggctaaaaaaatgtttttggctctgtgggcccatacgaccttgactgtgactactggactctgccactgtggagcaaacacagctgtgggcgtcacataagctagcgtggctgtgttccaatacagctttatttttaatactggaatttgaattccacatcatccctgtgttgtyacaaaatattcttattttgaatttcttttagccatttacatgaaaaccattcttagctcatagaccttggaaaactaggcagcaggccagattttacccacaggtacatagtttgcctgctgtgccctagagtaaaagatccaggacctgagcagaaggcacgacgtcctttctgaccaaacctcagaagtcacactgaggctctcaccttctccttcaggttacaccatgtgagagtcaatcacgtggggatgtgagctccaggacacaggggagaggaccactggggatccgggagcctggctaccccccagtaccccaccaacacacacacacacacacacacacacacacacacacactgcccctcacaggtgaccatctgctccacactttgagcagcgcagccactgttttcttgccagccattatgagaaaaatcatgctttcaagtctgaatataagccatggagtaagaggtctgatgaccactgaatctgcataaaggtacagtgctagaatctaggctaatactagaactggtggtattttagcaagcttagaaacagcccatgaaagcaggtgtgagttctgcttctgtggtttagggtgggtgagggagagcggtattgttctgtgctttctctttgactcgggtaaacgtttatctacaagagacttgtgggattcttacttggtccacctccaggtgactgggcttttactattaatgtaaactgcctgggacgcagcccctgccatgggaaacgcagggcacttcctgttctcagcatagagtgacaaggaaatttactcagagcggttactctgacattcaatgtttagttcaggaggcatttctgctttgccatcgagaatttttctcccttctaagaaaatgttttctcctgagaaaatttttctcccttccaagaaaagagtagaatgaaaggaggcaacttggtttcatagggagtgtcatgttgtccttctgagtttactgatgagcttacctgagaaaggagggtyctagcatgggagttctgttgytacaagacatgaaagaatggcctccgtttatcccggagaggagagtccctgagcccttgggagttgccttgaaacctctgccgggtcccagktgagaaagtgtgtgagttgtgtggttctgagatctgaacaggcaccrtctggtgacactaggggctgaaggagctcggtggctgcaggtggactggagctcaccatcaggaagtagccagattctcacccctcagtgtcaccgagtgttctggctttagaggaaggactccgtggtccccaagccacaaggtgtcgaggtctgagtctcaacgccatgactcagtgtgaattaacttagcaggtatcacaacatcagatttgggttgtggttccctgctgggtctgtactttagattgatgacaaagcccgtcctcagccttatttcagcccagatctcggtatttatgccacagatactgttgagctcctctgggtgcgtgctgaccctgaggtcacacagatgagccaggagtggccctggctttcaggaaacgtagtgacgtaaaaggtcccggctgctgcgggataagggccagggcagaggtgtgaacgcagccgtggaagacttgggccaggragccatttgttctgctgctaacacttccacagctccacrtgtccagactgttgccagagacgtctttggtctacaggattcaggagggaatctgaactttagcctggagcattatcaactcatagatgagtctgaaacaaacttagtgaaatctgatgttttttgtagttttccagtacagtttttcccatcgctggaatcctggtttggttctgcgggaatcgagtgcttgagtgggacccagacagacaggaagggcgctcctgctcagttagccccagtaagctcactgaggcrcacaggccccatgtccacagccgctcctggctgaggcgtggttcctaagacgacccttactgttgagggctgccaggagggagagacacattcagccccgcaggtcctctgggaatccggtgagcgtcggcaccgggctggggccgtgctgattcccggcagcgtgtgggaatgtgcgggtgcctcgtggcctgctgacatcgcacacaggtcacagcctgtccagttcaggacatcagggccaagagtgaagtgagaatacggaggcacctctgtgtgctcaccctgctgaccgtcacccagcctccggggggggtcacagctggcccccaggaarctgcttcccagcagggcaggaattccatttgagtcttgtccctgttccaggagaagggctgggtatgtgtcccccaaaggggagagcattcgagaaggatggcgccagcctccccagaactgacctgtggttwaaaaaaaaaaaaaaaattgtgctttttaaaagatgagttttatcagctcacacatccttctagagtctaatggagattttttgtgtgtgtggaaatagtaaacaaggtcttgaatcccacagagcaaaaaagacttcctttcatgggcagcactggaagggttgttactctggaatggtttaaaagaggcgtcacatggcttgtttgtgctgatgtcactgcctcgctgctctcctgtggcacctcctcggtccctggccacagggcacagagccaagcacatctcrtgctcttggcccagttacgcttctgcccaggggtaagtcagctggagaggaattcacagcccaggcatttcatgtcgttatggcctattttaatttttttaaccccaatcatttttcttaggaagtgatggggagtttggaaaggcaggcttatttgtcatcaagctgccagyttttatcaatgcaaaccacatccctgtgacatctgtgactgttccttggacagttaggtgagggagggtctcctggtggccccagggttactcttatttaggttgagaaaaattcctttttccaggatcgttggtgatcaaagtgtagtcattctgttgcgcagagaactccatcccagctccaccctcatgaattttgtaatcttggacaaattatttagtatcttagtgcttctgttccctcatctgtaacatgggggtatattatagtcagtagcacctgcttcacaaactcgtgaggacttcagcagttcacacacataactscctcgctgcctggcacctagygtgcacatggcattctaccgtggggtagacttttaaaattctggctacagagatacttttccataaaagtggccacatggaactctccaaatctaagaagcayactgtgggggccttcatattttgtctaattcttttctccccagaacaggaacctgcacccttccttcttttaaagggcgacgtggtaaataaacatttttagacttgcaggccacagtctctgtcctaatgtcctcagctggtagttgtagctggaaagcagctgcagcccacatggaaatgagggagcgtggccccatgccagtgcagctgatgtagaggcgggcagccccgggttaggccctgtggagacgcaggcccccgggctctagaacgctgaattctagtgaattctggatggctctccctcacacccaggcccaccctccctcaaggttgcaccwtctccacctgaaggaagctgccaggtggccataggagcccttctcttggcaggccagcttccaggcccagtggcttctcttacatcaggggcctccccttggaatgttccctgaaggccagacacgggcaggtagtctgtggtcaagcagccaccctgacaggaggctagatgccactgggtgtgctttgagtttcctagatgtggagagttctgtgtggccacttttatggaaaagcatctctttagccagaattttaaaataaagaggataacttcctggtgagaacagacgtggaaaggaaggcactttggtttcacgctcaygtaagagagggctgttggcggtcactcctcagaactatggccagccctggatggtagccagctgctttttgccccaaaagtctgtttagctgggtctctgcattctggaagcttgtcaaagcccgggcctttcctgggtcagggcagccggctttccttgtccacgtgtggccggctgttttcttggggagccccggccacagccggcaggactccctttgctccatgygactctgagggcctcacaggtatttgcagcccaggtgctgtcggagcccagccgatgckaccgacacacagcacaagcgtcatcctgttctgcctgtcccttgcgtgtggaggggactcgtgcccagggctctccttgctggcttgttggaatctggcttcaggtctacacggggcctctcgtttggtccagaacagcctggctcatcggctggggcttgcttgtgcagggctggagcgagcacgtgctagatggagacagcagactyggagtgtgcatttcttcgtgttgcaagcctggcctcacagtgccttcttcctttggttgtctgccaggggtagccctgcaccaggaggaagcttagaaatagcacaggtgggaaccggagagagagcactgttggggaagctgcggtcactcatcagccttcctggtgagaaaccaggggtttcctgctaattctggaaaggatgtttcagcagtgcctgcatgagaygcctcagatagaaaactggttatttttgtttcttagcactgccaccatagataacagctgtcacgatggacagtgtggacctggattagtccttcttgggaaaggagagtttgggttttgtaccrtggtggttytgggttctgrgggaagagaatggaaccgtacgaggtaaaacaggagactctgaaggccacttggccatccaggcagaaagccagggatggagaggggcagcagggctgtgttcagtgctcccgccgtacgcttgtatgcgggaaaccactgcaggcggcccatgaagcctcctggccatgtgcgccctcccrgtttggaccccctcccgtgtgtcttggctgcaggtttgaactgatgygcatgtgctggcagtataaccccaagatgaggccttccttcctggagatcatcagcagcatcaaagaggagatggagcctggcttccgggaggtctccttctactacagcgaggagaacaagctgcccgagccggaggagctggacctggagccagagaacatggagagcgtccccctggacccctcggcctcctcgtcctccctgccactgcccgacagacactcaggacacaaggccgagaacggccccggccctggggtgctggtcctccgcgccagcttcgacgagagacagccttaygcccacatgaacgggggccgcaagaacgagcgggccttgccgctgccccagtcttcgacctgctgatccttggatcctgaatctgtgcaaacagtaacgtgtgcgcacrcgcagcggggtssggkgggagagagagttttaacaatccattcacaagcctcctgtacctcagtggatcttcagwwctgcccttgctgccygcgggagacagcttctctgcagtaaaacacatttgggatgttccttttttcaatatgcaagcagctttttattccctgcccaaacccttaactgacatgggcctttaagaaccttaatgacaacacttaatagcaacagagcacttgagaaccagtctcctcactctgtccctgtccttccctgttctccctttctctctcctctctgcttcataacggaaaaataattgccacaagtccagctgggaagccctttttatcagtttgaggaagtggctgtccctgtggccccatccaaccactgtacacacccgcctgacaccgtgggtcattacaaaaaaacacgtggagatggaaatttttacctttatctttcacctttctagggacatgaaatttacaaagggccatcgttcatccaaggctgttaccattttaacgctgcctaattttgccaaaatcctgaactttctccctcatcggcccggcgctgattcctcgtgtccggaggcatgggtgagcatggcagctggttgctccatttgagagacacgctggcgacacactccgtccatcygactgcccctgctgtgctgctcaaggccacaggcacacaggtctcattgcttctgactagattattatttgggggaactggacacaataggtctttctctcagtgaaggtggggagaagctgaaccggcttccctgccctgcctccccagccccctgcccaacccccaagaatctggtggccatgggccccgaagcagyctggcggacaggcttggagtcaaggggccccatgcctgcttctctcccagccccagctcccccgcccgcccccaaggacacagatgggaaggggtttccagggactcagccccactgttgatgcaggtttgcaaggaaagaaattcaaacaccacaacagcagtaagaagaaaagcrgtcaatggattcaagcattctaagctttgttgacattttctctgttcctaggacttcttcatgggtcttacagttctatgttagaccatgaaacatttgcatacacatcgtctttaatgtcacttttataacttttttacggttcagatattcatctatacgtctgtacagaaaaaaaaaagctgctattttttttgttcttgatctttgtggatttaatctatgaaaaccttcaggtccaccctctcccctttctgctcactccaagaaacttcttatgctttgtactagagtgcgtgactttcttcctcttttcccggtaatggatacttctatcacataatttgccatgaactgttggatgcctttttataaatacatcccccatccctgctcccacctgcccctttagttgttttctaacccgtaggctctctgggcacgaggcagaaagcaggccgggcacccatcctgagagggccgcgctcctctccccagcctgccctcacagcattggagcctgttacagtgcaagacatgatacaaactcaggtcagaaaaacaaaggttaaatatttcacacgtctttgttcagtgtttccactcaccgtggttgagaagcctcaccctctctttyccttgcctttgcttaggttgtgacacacwtatatatatatttktttaattcttgggtacaacagcagtgttaaccgcagacactaggcatttggattactatttttcttaatggctatttaatccttccatyccacgaaaaacagctgctgagtccaagggagcagcagagcgtggtccggcagggcctgttgtggccctcgccacccccctcaccggaccgactgacctgtctttggaaccagaacatcccaagggaactccttcgcactggcgttgagtgggaccccgggatccaggctggcccagggcggcaccctcagggctgkgcccgctggagtgctaggtggaggcagcacagacgccacggtggcccaagagcccctttgcttcttgctgggggaccagggctgtggtgctggcccactttccctcggccaggaatccaggtccttggggcccaggggtcttgtcttgtttcatttttagcacttctcaccagagagatgacagcacaagagttgcttctgggatagaaatgtttaggagtaagaacaaagctgggatacggtgattgctagttgtgactgaagattcaacacagaaaagaaagtttatacggcttttttgctggtcagcagtttgtcccactgctttctctagtctctatcccatagcgtgttccctttaaaaaaaaaaaaaggtattatatgtaggagttttcttttaatttattttgtgataaattaccagtttcaatcactgtagaaaagccccattatgaatttaaatttcaaggaaagggtgtgtgtgtgtatgtgtggggtgtgtgtgtgtgagagtgatgggacagttcttgattttttgggttttttttcccccaaacatttatctacctcactcttattttttatatgtgtatatagacaaaagaatacatctcacctttytcagcacctgacaataggccgttgatactggtaacctcatccacgccacaggcgccacacccaggtgatgcagggggaagccaggctgtattccggggtcaaagcaacactaactcacctctctgctcatttcagacagcttgcctttttytgagatgtcctgttttgtgttgctttttttgttttgttttctatcttggtttccaccaaggtgttagatttctcctcctcctagccaggtggccctgtgaggccaacgagggcaccagagcacacctgggggagccaccaggctgtccctggctggttgtctttggaacaaactgcttctgtgcagatggaatgaccaacacatttcgtccttaagagagcagtggttcctcaggttctgaggagargaaggtgtccaggcagcaccatctctgtgcgaatccccagggtaaaggcgtgggkcattgggtttgctccccttgctgctgctccatcccygcaggaggctcgcgctgaggcaggacygtgcggccatggctgctgyattcattgagcacaaaggtgcagctgcagcagcagctggagagcaagagtcacccagcctgtgcgccagaatgcagaggctcctgacctcacagccagtccctgatagaacacacgcaggarcagagtcccctccccctccaggctgccctctcaacttctccctcacctccttccctaggggtagacagagatgtaccaaaccttccggctggaaagcccagtggccggcgccgaggctcgtggcrtcacgccccccccgccagggctgtacctccgtctccctggtcctgctgctcacaggacagacggctcgctcccctcttccagcagctgctcttacaggcactgatgatttcgctgggaagtgtggcgggcagctttgcctaagcgtggatggctcctcggcaattccagcctaagtgaaggcgctcaggagcctcctgctggaacgcgacccatctctcccaggaccccggggatcttaaggtcattgagaaatactgttggatcagggttttgttcttccacactgtaggtgaccccttggaataayggcctctcctctcgtgcacatacctaccggtttccacaactggatttctacagatcattcagctggttataagggttttgtttaaactgtccgagttactgatgtcattttgtttttgttttatgtaggtagcttttaagtagaaaacactaacagtgtagtgcccatcatagcaaatgcttcagaaacacctcaataaaagagaaaacttggcttgtgtgatggtgcagtcaytttactggaccaacccacccaccttgactataccaaggcatcatctatccacagttctagcctaacttcatgctgatttctctgcctcttgatttttctctgtgtgttccaaataatcttaagctgagttgtggcattttccatgcaacctccttctgccagcagctcacaytgcttgaagtcatatgaaccactgaggcacatcatggaattgatgtgagcattaagacgttctcccacacagcccttccctgaggcagcaggagctggtgtgtactggagacactgttgaacttgatcaagacccagaccaccccaggtctccttcgtgggatgtcatgacgtttgacatacctttggaacgagcctcctccttggaagatggaagacygtgttcgtggccgacctggcctctcctggcctgtttcttaagatgcggagtcacatttcaatggtasgaaaagtggcttcgtaaaatagaagagcagtcactgtggaactaccaaatggcgagatgctcggtgcacattggggtgctttgggataaaagatttatgagccaactattctctggcaccagattctaggccagtttgttccactgaagcttttcccacagcagtccacctctgcaggctggcagcygaatggcttgccagtggctctgtggcaagatcacactgagatcgatgggtgagaaggctaggatgcttgtctagtgttcttagctgtcacgttggctccttccaggktggccagacggtgttggccactcccttctaaaacacaggcgccctcctggtgacagtgaccygccgtggtatgccttggcccattccagcagtcccagttatgcatttcaagtttggggtttgttcttttcgttaatgttcctctgtgttgtcagctgtcttcatttcctgggctaagcagcattgggagatgtggaccagagatccactccttaagaaccagtggcgaaagacactttctttcttcactctgaagtagctggtggtacaaatgagaacttcaagagaggatgttatttagactgaacctctgttgccagagatgctgaagatacagaccttggacaggtcagagggtttcatttttggccttcatcttagatgactggttgcgtcatttggagaagtgagtgctccttgatggtggaatgaccgggtggtgggtacagaaccattgtcacagggatcctggcacagagaagagttacgagcagcagggtgcagggcttggaaggaatgtgggcaaggttttgaacttgattgttcttgaagctatyagaccacatcgaggctcagcagtcatccgtgggcatttggtttcaacaaagaaacctaacatcctactctggaaactgatctcggagttaaggcgaattgttcaagaacacaaactacatcgcactcgtcagttgtcagttctggggcatgactttagcgttttgtttctgcgagaacataacgatcactcatttttatgtcccacgtgtgtgtgtccgcatctttctggtcaacattgttttaactagtcactcattagcgttttcaatagggctcttaagtccagtagattacgggtagtcagttgacgaagatctggtttacaagaactaattaaatgtttcattgcatttttgtaagaacagaataattttataaaatgtttgtagtttataattgccgaaaataatttaaagacactttttttttctctgtgtgtgcaaatgtgtgtttgtgatccattttttttttttttttttaggacacctgtttactagctagctttacaatatgccaaaaaaggatttctccctgaccccatccgtggttcaccckcttttccccccatgctttttgccctagtttataacaaaggaatgatgatgatttaaaaagtagttctgtatcttcagtatcttggtcttccagaaccctctggttgggaaggggatcattttttactggtcatttccctttggagtgtagctactttaacagatggaaagaacctcattggccatggaaacagccgaggtgttggagcccagcagtgcatggcaccgttcggcatctggcttgattggtctggctgccgtcattgtcagcacagtgccatggacatgggaagacttgactgcacagccaatggttttcatgatgattacagcatacacagtgatcacataaacgatgacagctatggggcacacaggccatttgcttacatgcctcgtatcatgaytgattactgctttgttagaacacagaagagaccctattttatttaaggcagaaccccgaagatacgtatttccaatacagaaaagaatttttaataaaaactataacatacacaaaaattggttttaaagttgactccacttcctctaactccagtggattgttggccatgtctccccaactccacaatatctctatcatgggaaacacctggggtttttgcgctacataggagaaagatctggaaactatttgggttttgttttcaacttttcatttggatgtttggcgttgcacacacacatccaccggtggaagagacgcccggtgaaaacacctgtctgctttctaagccagtgaggttgaggtgagaggtttgccagagtttgtctacctctgggtatccctttgtctgggataaaaaaaatcaaaccagaaggcgggatggaatggatgcaccgcaaataatgcattttctgagttttcttgttaaaaaaaawtttttttaagtaagaaaaaaaaaggtaataacatggccaatttgttacataaaatgactttctgtgtataaattattcctaaaaaatcctgtttatataaaaaatcagtagatgaaaaaaatttcaaaatgtttttgtatattctgttgtaagaatttattcctgttattgcgatatactctggattctttacataatggaaaaaagaaactgtctattttgaatggctgaagctaaggcaacgttagtttctcttactctgcttttttctagtaaagtactacatggtttaagttaaataaaataattc

SEQ ID NO: 9852 - DNA, 13677 bp, Homo sapiens
aatatatattaagaagaataagcctactttacaccccaagacagacaggctgtgcacagcacaactccactggtgggtgctgtccacccaggcttcctaatggtgccctggagggggtaacacaatggacctgctcctctctccagaggcagccattgccactgtttcctgtgtctctcctttttttttttttttttttttttgagacagggtctcactctgctgcccagactggagtgcagtggcacaatcttggctcactgcagtctcgacctcctgggctcctaccttagcctccccagtagctgggaccacaggcgtgtaccaccacacctggctaatttttgtatttttttgtagagacaggttttcaccatgttgcccaggctggtctctaactcctgggctcaagtgatccctgtgcctcggcctctcaaagtgctgggattacaggagtgaggcagtgtgtggccccagactttgatgttgactagtttaaaaagaaaaaggaaaagctgtgtaccagaaggaggaaattgggtcctgctgtgtaactttaggctagtctcactgtctctttgtggcctggtttcctcctttgggaactgaagaggatcatgcctacctcatttttctcagtctctccggagaatggtaagattatagctatgaaagcacccattttagacatgaagatattgaggtccaagttcatgttctgcacaggtggcattcttcttattcttgtggctgcgtccagagactcagtaggaaaagaccctcttaccggaagatgggggagaggaaggagtcctgtctgccatgctcccagctttgatggagatggctagtgggtcatcacaaatctgtgcggccctctggggactacattgacctgtgcatccgggggtgcatccaagttctcaccaatggaacgtgggtgggagatgatgccagtcccttctgagcctggtgtgaagaaatgcacgtggcttctttggcactttcccctacctccagctgcagtcagagatcatgaggccccagggaatggtggagccacatggtggaaagaacctaagaacctgaatcaccacacggagggcagccaccggcccaccagaacacctctattggattcatatgtgagtgagaaataaacttgtatttggcttgtcactgaaatgtragagtttatttattacaggagctagtgtcgtcctatcactcaccctgacttttcttcataagtccagtcctaagctgctaggatgggcgtaggaggagacatcagcaatgattcctcccagcagatacagggttgttagaaaccactgaggatagggaagagggagtgacatctcctccctggctctgaacttggctctagtgtggccactagcatttggggcttgggggttgcagctgtcgcattccacagtggccccgatggcattacaattacagatgacacttagagccaccctagggaagcaaaggcaaggacaagcagctgatgggagggggagcagaagggctgcggccacagccagagccccggatctgccctgaccctggtctgtgtccccttagccgaagccagcacttcctagggtctccatttctctgtctgtataagcgtctaatacccctgccctggttgggggagggaggagcatgtggatggtgaggagtgagagaatggatctgaaacctgatgtccctgagattccacactgctgtgcaatcagaggccccgaacccaagcccctcagcctatgcygaggctttttcttgggaggggtttaaaaaatatgttagggaagaaaaaaaaatcaaagtgcccaattcctattattttgggatcatccagaaggctgttgtgagctaagggacctggagggggtgtcttgggagctttgaaggcagctcacaggactgaattcagaatctgtgggcagctccctttgctgccaaatgtctattctcaggtgtcacaatcgttgaaattcttccattagggcttcattcctttggattactttttgtttctayacaaaaatgcaagcaatgataatccccaatatgtgttcagggctttagacttgttccaataatcctaaaagacacagacagacagtgaggcccagatacctggtgtggctacttcttcaatcatgcttctcctgacagagtgattatcgggcaactcgactcctaggtatatagccagaaactcttgcacatgtgccctagaaacacggataaaaatacttatagtagccctatgtgtaataacaaaaattggcgataacccaaacccattgataggagaaggaataattggatatttaaaaaactgaaaatgggccgggcatggtggctcatgcctgtaatcccaagactttgggaggttgaggctgaagtttgagctcaggtgtttgagaccgcctgggtaacatagggagacaccacctctatttaaaaaaaaaaaattagccaggcttcgtggtgtgcacatgtggttccagctacttgggagctgaggtaggaggattgcttgaggctgggaggtcaaggctgcagtgagccatgatcacaccactgtactccagcctgggcggcagattgargccctgtctcaaaataaataagtaaataacatagaaaccggaaaacgattgaatcatgtttaagttacgcattgctgcctaaaaaatcatgttaaaacacagtggcaaccacgatcatttgtttgctcacattctataattcagtcggggtttactggggatggcttgtctctacttcatgtggctccacctggggaggttcaactggagctgggggatcaactctcaaaatggtcctcctatggctggcaagttgatgctgactgtttgctgggaggtctgctggaactcttagctagtgggccttggttatcctgcgtgtgacctctccacaagacttctcacagcatgatggtctcagagtaatcaaacttcttacatggtggcttaaggtctctaagaatacaaaagcagtagaagttactatacctttttaaggcttaggtctggaatgggcacarggttacttctgtcccattctattggctaaaagagtcacaagccagaaatgttcamggggmggcaactacaaaacagtgtgaatacccagaggtatacctcactgggagacattgacttccacaaaccacaactacccacaactacatggataaatattaggttaggttatgcttcagtatcaaataacctctacatttcagtgacttcacacacaaatggttacttttttcttatatacctatcccatagaagttggtggggcactctgctccacgcattcactcagggatccaggctgatggaggctccaccatgttggagtggcaccattgcaccacctgggacatgagacctcacctttgccacaactgtgaaggacagaaaggctcgagaatttcacctggcctcagctctaaagagacaaatgtcacttatgctcacatttcatcagctaggactagtcgcatgatcccatctacactgtaagtggggctggaaaatgttggagaacacctggaaaaatggctgagcattactgtcttggccacatgtgatagaactatttaaaacaaaaaaagttttacataagatgcaaggtagtgttcactttggggtaggggtggaacacacaagaaagtgtcagtgatttgtaatattctagtttttggtttgagcagtgagtgttaattattttttaaaacaaatgaatgaatgaatggacaaatgaataaataaaagagagggctcgaggcagcagcactgaagcctaacctcacagtacaggccaaaaatgacccttcaataaacattcactgagttcccagctgaagctggtaggcctctccaaggtacaaagatgaataaaatatgggctcagcccctctaagtgcccagctcagaggattcagtagacacataaaccaagcaggagggcaaagtacagtggagagtcttgctcagtgggagctctgggagtagagggagccccgagtaggcctcaccccaagtcacatgtgttgggttatgaagaatcaataggaattcaaaggtgaagaatggagtggaggtggggcaagttggtcagggacactcattttaccaagagaggaagatttgtgcaaaggcacaaagaggccttcacccctcaggtggcctgtgttcacagcatttcctcactgccttctagtccctaaatgatctgatcaacttactccctctgtactgtaccacccagaagcttctgcaagagccaggcacttgtcctccacaatggctgccatgagtgttggttgccgatggttacagccaagtcgttccttggccttagaggmggaagctctcttgcccgagggcatgcactcccctactgcaggggcagccacgtttagatgactgtttggaaacccagggtgtaagggcctagctctcatgcttcaattcagcgaactctgcaggaccatcccagctccagggctcctggtgggatcagccaagkcctctgtgggcctccagcctccatyagttcccggttcttctctctgcccaattccrtttcttttatatccagacaagtgttgattgtgaatgcactccccaataaactyccttcaagcaaaactctatgtcagaatgtgwtttctgggaaacctacctaagatacccactaaaatatagataattactaaattccaagggatgcctttcctggggatgtttgtacagcaattatcmtcataactaatattcatggagtgatttctatgtgccaagctaagcactttgcttttaagatcatatttaatgaagaacagagcctcacagtaagaatacatgtcttttcttttawttatttatttatttattttgagacagagttttgctcttgttgcccaggctggagtgcaatggcgcaatctcagcttactgcaacctccgcctcccgagttcaagtgattctcctgcctcagcctcccaagtagctgggattacaggcatgcaccaccatgtccagctaattttgtatttttagttrtagatttctttgctccttctccactcccactgcttcatttaactagccttaaaaaaattattaaaaataaaaataaataggcctggccaggcgtggtggttcgtgcctgtaatcccagcacttgggaggctgaggcaggcggatcacctgagttctggactttgagaccagcctggccaacatggtgaaacccgtctgtactaaaaactattaaaaaattagccaggcatagtggcaggagcctgtaatcccagctacttgggaggctggggcaggagaattgcttgaacctgggaggtggaggttgcagtgaactgatawcgcaccattgcattccggcctgggcgacagagtgaaactccatctygaaatwaataaataaataaataaataaataaataggcctggcatggtggctcacacctgtaatctcagcactttgggaggctgaggcagccagataatttraggtcaggagttcaagaccagcttggctaacatgatgaaacatgacgaaacccccgtctctgctaaaaattcaaaaattagccagtcatggtkgtacatgcctgtaatcccagctactcgggaggctgaggcaggaaaatcgcttgaacctagaaagtggaggttgcagtgagctgagatcacgccactgcactccagcttgggcaacagagcaagattccatctcaaaaaatatataaaaaataaaaataggctgggcgcagtggctcacgcctgtaatctcagcactttgggagaccgaggcagacagatcaactgaggtcgaggtttgagaccagcctgaccaacatagagaaaccctctctctactaaaatacaaacattgggtggggcgagtcatcgtctgamgtctggccgtgagatgtttcgggagccggggtctctccgctgcagacatgacgaagggccttgttttaggaatctattccaaagaaaaagaagatgatgtgccacagttcacaagtgcaggagagaatcttgataaattgatagctggaaagctgagagagactttgaacatatctggaccacctctgaaggcaggcaagactcgaamcttttatggtctgcatcaggacttccccagygtggtsctagttggcctcggcaaaaaggcagccagaatcgacgaacaggaaaactggcaggaaggcaaagaaaacatcagagctgctgttgcagcaggatgcaggcagattcaagacctggagctctcttccgtggaggtggawccctgtagagaygctcaggctgctgaggagggcgcggtgcttggtctctatgaatacgatgacctaaagcaaaaaaagaagatggctatgtcggygaagctctatggaactggggatcaggaggcctggcagaaaggagtcctgtttgcttctgggcagaacttggcatgatggagacgccagccagcgagatgatgcmaaccagatttgccgaaattattgagaagaatctcaaaagygctagtagtaaaccgagkttcrtatcagacccaggtcttggattgaggaacaggcaatgggatcattcctcagtgtggccaaaggatctgaygagccctcagtcttcttggaaattcactacataggcagccccaatgcagacaaaccaccccttgtttgttgggaaaggaattacctttgacagtggtggtatctccatcaaggcttctgcaaatatggacctcatgagggcygacatgggaggagctacaactatatgctcagccattgtgtctgctgcaaatctcagtttgcccattaatattataggtctggcccctctgtgaaaacatgcccagcggcaaggccaacaagctgggggatgttgttagagccaggaacrggaagaccatccaggttggtaacactgatgctgaggggaggctcatactggctgatgcgctctgttacgtgcacacatttaacccgaaggtcatcctcaatgccaccaccttaacaggtgtcatagatgtagctttggggtcaggtgccactggggtctttaccaattcatcctggctctggaacaagctcttcgaggccagcattgaaacaggggaccgtgtctggaggatgcctctcttcaaacattgtacaagacaggttgtagattgccagctggctgatrttaacaacattggaaaatatagatctgcgggagcatgtacatctgcggcattcctgaaagaattcgtgactcatcctaagtgggcacatttagacatagcaggtgtgatgaccaacaaagatgaggttccctatytatggaaaggcatgaccgggaggcccamaaggactctcatagagttcttacttcgtttcagtcaagacaatgcttagttcagatacwcaaaaatgtcttcactctatcttaaattggacagttgaagttaaaaggtttttgaatgaatggatgaaaatattttaaaggaggcaatttatatttaaaaatgtagaacacaatgaaatttttatgccttgatttttttttcattttacacaaagatttatatattttttttttgagacrgagtctcactctgtcacccaggctggagtgcaggtggcatgatctcagctcactgcaacctccgcctcctaggttcaagcgattctcccacctcagccacctgaatacctgggactacaggygcccaccaccatgcccggctgatttttgtatttttaatggagacggggtttcaccatattggccaggctggtctcaaaactcctgaccctgtgatctgcccgcctyggcctcccaaagtgctgggattacaggcgtaagccaccacgcccggccagtatatatttttaattgagaagcaaaattgtacttcagatttgtgatgctaggaacatgagcaaactgaaaattactaaccacttgtcagaaacaataaatccaactttttgtgcaaaaaaaaaaatacaaatattagctgggcatggtggtgcatgcctgtaatcccagctactcgggaggctgaggcagaattgcttgaacctgggaggcggagactgcagtgagctgagattgtgcyactgctgactttgtctcaaaaaacaaaacaaaacaaaaaaacaaaatgaaaacaaaaagccagggctgcctctgctcaataatgttctatctttgttccgcctcttctctggggtctcacttcttgggagcctgtgtgaaggtgaattcctctgaaagctgactgcccctatttgggactccccagtctctttctgagaaatggtgacattgttcccagcacttcctctcccttcctaggcagcttctgcagccaccactgagccttcctcacatcctccttcttcaggcttgggctttccacctttcaccattcccctaccccatgctgctccaccgcactctggggagggggctggactgggcactcttgtcccccaggctgagcctccctccatccctatgctgcctgcttcccaggaacatgcttgggcagcaggctgtggctctgattggctttctggccrtcaggaacatgtcccaacatgttgagctctggcatagaagaggctggtggctattttgtccttgggctgcctgttttcaggtgaggaaggggatggtaggagacaggagacctctaaagaccccaggtaaaccttagcctgttactctgaacagggtatgtgatmtgccagcagatccttgcgacagggctgggatctgatgcatgtgtgcttgtgtgagtgtgtgctgggagtcagattctgtgtgtgacttttaacagcckgctcccttgccttyttcagggcagargtcctcccttagagtgtgtctgggtacacattcaagtgcatggttgcaaacttttttttttwaagcmctgaatagtactagacacttagtaggtacttaagaaatattgaatgtcrtggtggtggtgagctagaagttataaaaaaaattctttcccaaaaacaacaacaaaaagaattatttcattgtgaagctcagtaccacaaaaatttaaataattcattacaagcctttattaaaaaaaattttctccccaaagtaaacagacagacaatgtctagtctatttgaaatgcctgaaagcagaggggcttcaaggcagtgggagaaggtgcctgtcctctgctggacatttgacaaccagccctttggatggtttgkatgtataggagcgaaggtgcagacagcagtggggcttagagtggggtcctgaggctgtgcygtggccyttctggggtttagccacaatcctggcctgactccagggcgaggcaggccaagggggtctgctrctgtgtcctcccwcccctacctgggctcccatccccacagcagaggagaaagaagcctgtcctccccgaggtcagctgcgttagaggaagaagactgggcatgtctgggcagagatttccagactctgagcagcctgagatgtcagtaattgtagctgctccaagcctgggttctgtttttyagtgggatttctgttcagatgaacaatccatcctctgcaattttttaaaagcaaaactgcaaatgtttcaggcacagaaaggaggcaaaggtgaagtccaggggaggtcaggggtgtgaggtagatgggagcggatagacacatcactcatttctgtgtctgtcagaagaaccagtagacacttccagaattgtcctttatttatgtcatctccataaaccatctgcaaatgagggttatttggcatttttgtcattttggarccacagaaataaaggatgacaagcagagagccccgggcaggaggcaaaagtcctgtgttccaactatagtcatttctttgctgcatgatctgagttaggtcaccagacttctctgagccccmgtttccccagcagtgtatacgggctatgtggggagtattcaggagacagacaactcactcgtcaaatcctccccttcctggccaacaaagctgctgcaaccrcagggrtttcttctgttcaggtgagtgtagggtgtagggagattggttcaatgtccaattcttctgtttccctggagatcaggttgcccttttttggtagtctctccaattccctccttcccggaagcatgtgacaatcaacaactttgtatacttaagttcagtggacctcaatttcctcatctgtgaaataaacgggactgaaaaatcattctggcctcaagatgctttgttggggtgtctaggtgctccaggtgcttctgggagaggtgacctastgagggatcagtgggaatasaggtgatattgtggggcttttctggaaattgcagagaggtgcatcgtttttataatttatgaatttttatgtattaatgtcatcctcctgatcttttcagctgcattgggtaaatccttgcctgccagagtgggtcagcggtgagccagaaagggggctcattctaacagtgctgtgtcctcctggagagtgccaactcattctccaagtaaaaaaagccagatttgtggctcacttcgtggggaaatgtgtccagcgcaccaacgcaggcgagggactgggggaggagggaagtgccctcctgcagcacgcgaggttccgggaccggctggcctgctggaactcggccaggctcagctggctcsgcgctgggcagccaggagcctgggccccggggagggcggtccygggcggcgcggtgggccgagcgcgggtcccgcctccttgaggcgggcccgggcggggcggttgtatatcagggccgcgctgagctgcgccagctgaggtgtgagcagctgycgaagtcagttccttgtggagccggagctgggcgcggattcgccgaggcaccgaggcactcagaggaggtgagagagcggcggcagacaacaggggaccccgggccggcggcccagagccgagccaagcgtgcccgcgtgtgtccctgcgtgtccgcgaggatgcgtgttcgcgggtgtgtgctgcgttcacaggtgtttctgcggcaggtgaatgacgggcgtgggtcggtgcgcgctcggcttgcgcacacggtgtctctaagtgcgcgggtgacgagrgtcgggatgtgccggagaycccggggcggagagcgggattacaagtacaggaatccctggycacgctccccgcccctggaaacccagctggggcgagggagggcgtggacgggaccgttctgggagctcgcctttggctgcggttggctccaggccccaggmgcagtttgctcgcggcgtgkggatgaagtccgtgtccctggaggggcccaggaagggcgaggaaagcggagtggagtaakttcgtctaggatcggtcccgggtggctctgggatccaatctgckccgccctggcccaggtcccaggttcaggtcctttacgccactgtgtccaccacctggctgagcgctgaggtcagcgcgggctgtttyctggcccttgggaatgtgccaggacccgtcccctaaggactagcgaggaggtgactcactgtgacaaggagaccccagggaacggactgtatgaggtcagaaccccgcccgggatggggtacagcggractccagaagccctctcccctgccccttcgcggtctccrtcctcccatcggcacagtgacctatttggctggaacagtttgttcccaaggaagccgggcactggaggtycgggacaccgcgtcgggtccccgctccgcggcgcgctgtaggggtcggggagtcacggmcctgckctgggcgggctctaaccagcctgtcartcggggaagggcaagggtctcctctacctctttcycaccgcggccgggagaatcgcggcccagcctgtcctcgggtcggggcgctggactccggggcgggagcggagcccacgcctggatgggaggcggggaggkttcatgtctttgaggggtggggggtctggggggcacgacgctgctcagggcctcyatcagctgcctcgggggctcagggcttcccgacctagcccagattccctctccgaaagctacagggctgagcggagcaggggggcgagtcgccccctggggcgccgccgcctggcgcggaccacagcgcgtcctctccgtcccaaacccctgggggacacttgcgccctcttcgtgaggaaaagcatcttggagctgggttaggaacttggggcgcccaggcagcttcccctctccttgcctccctccacgtcgcgtttctgggaggacttgcgagcggttttgttttcgttgctcccgtctatttttattttccagggatctgactcatcccgtgctttgggcgtggagataaggtggaggggccggctcccggcgcgcgcgcgcgtgcgtgtctgcgcgggcgtgtgtgtgtgtgtgtgtgtgtgtgtgtgtgtgtgtgtctgtgtcagagacggcacaagagcgcgcggtttcccaacagcggcgggagtttcggaagcctggccggctcagcgtgacgtgttcgcggccccccggtcccctcccattctccccctccccaccccagggtgacgcgcagccggagtggaagcagttttggcgggcgagcagcgccttgcaggaaactgactcatcactactccctccagcggtccgaggctctgcccacgcacctcccacyccgcgcgtgatttcctggaggccggcgccccctcccggccctggcgggaatagcacacaggctttcccgcggagtggggctggccggcgcgaaccgccgyggctactcctgggctcatccgagatcaacccctatgccattaccaccccttcaaaggagcactccttaggttcaacagtattcactgagctcttactggaaattaaaatatggctgaagtctaaggcaggaaggccaataaaggaggctatttttaattgtttctaaaacaagggtttgcgtttctgagttttctttgggctgaaagttattatgagcatgagagcagattttgatgggggaggagaggcctatgagagccataagagaaggaggggtggtagaagaggagagggtgcctgcctagatcctagtcctgtcttgaactcccgagagccagggaatatccagcwccttgatgaagccmtaggcgggcgcctcctccttgtgcstatgatgtattgagacccagaatgtccatttcaaacataccagtgtgtctccgcttggctggcamcccaagagtgcccatctgaggaattgtgccaaacacttgcttgaatcttcaatytggattaagttggtctcgggaggcagggcctcagcaatctatattttgaaaaaactccctaggtgcttttctttctytytttctttctttctttctttctttctttctttctttctttctttctttctttctttttctttctttctttctttttctttcttttctttctttctttctttctttctttctttctttctttctttcttcctttctctttctctctttctttctctttctctctttctt

SEQ ID NO: 9853 - DNA, 34730 bp, Homo sapiens
gcctgaaatttaaaatgttcaacataaaacacttgaaatacaagataaatggtatttccatttgacaagagaatatggttaaactttcaaaaatctttccaastaaagtagccttaaacgggcattcattccaaaatgcttttatagtgttactttataagaattaagttcactcaaaattggtamacttaatatattcttcaacctccagtttttcaggataactaywtttatacagaaatctagtctattacaacattaaacaaaacaaagaygacaaacactgggttattgattttatcacaggttttgttcaaaccaacatatttagtaaagtaccagtagtttcagcaygagtwaagtccaaaggaaatcttacctcagtaataaactaccacgtcctctacctccaccaggaccagaaagggccagcaatctggcttggatgggcctgtaaaagatttacawatcagtgcaaaatcatatgtagacacacacagtcgcacccaaatactttyagagatgtgratcataaggagaaaaaatcacaaaagttccaaaaagatagtttcaaataaatctaaatgtctgaaacaggacaggaagtactatttcatttaacttcctcgtttctccaggacctgtgtcacagaaattatattcacctcgatgcccccacacattaacaagcctggatcaggtccccatcccgccatccccgaggaggctgcacgtggacaggaagyyggggtaaggcggcttgttgcgtcccggcagggtctcggggccagcaacrggccgggtgtccgccggagcgggaaggggcwttgtgctgcagttccgggcctgcagggccgagagcgggaatcagcagtccgggtcttctcacaggccaagamagcatgccggcgcacccaggcctcgctctccttcctcagggacctgagaccagcgctctacsgaggggacctggggcctctccacctcggcgacaacagggttttacccgccgccccgcgaacaggcctcgaggttccagtcttcttaaggctggccgccctccccgcccccaattcaccccgacctgagggctgcctctccgagctccgagttccgagttcccgttaggcccttacctcacgtcattcggatcccgcccggtgagcttgcgaatgttctcatccacgttcttaagactctctttggccttttccagctgttcctgcaaagttctyacggcgaccgccatcttctccctgcggcaggcttgagactgctttacaggccgagccgggctatgccgcgccgccgaggygcgaaaggactgacagccgggctcagccaatgacgatgagcgttgtcttycggcctcaaccactcagcgaccggaagggggaagaacctgcagcctttgtgactctgagccaatgaaaagtcagccaggcagtcayctccctccccagttagctgcgggtgcctggatcccgctgctagcgcagagtcggggcgggtttcacaatccctgagttctcggagacttaggctcgcgagtctgcagttcyggcaaggggagcgcggagttttctaggccttttaacctatgatgtaatgtgccttacaccgttttaacgtgatcacatcasagtgggacttagccaagcctccttttcttccttaccctcaccttggttaatgatttaattaggaaagggcgcggctattctgttggtgcgcatgctcagagagggggtgggcgcgtgctttcctctattaggttaattttttttttttcacacggagtctcgctctgtcgtccaggctggagtgcagtggcaccatctcggctcactgcaacctcctcctcccgggttcaagcgattctcctgcctcagcctcctgagtacctgggactacaggcgcgcgccaacacgcctggctaatttttgtattattagagaccggattccassatgttgggcaggctggtctcgaactcctgacctcaggtgattcgcctgcctcgacctcccagggtgctgggattacaggcgtgagccaccacgcccagcctgattaggttaaagtgagaagagggaagacaaaaatgaaaactagtaaaagtcattagtcataatggctaacgtttgttaggggttgatcttgttcccgaccctctgtgaaaccgtctacatgccttatttctcacaaactgaaagtgtggataaaatgcctgttattactgataaggaaattgagactggagataatataactgtcctttggtcacgccagttgagaatcagtctctgattagacgctgagcatctatactagagaaaagaaagcaatggcgagacagacacgcagtcatggyygagttagcctcttcacctggcctagagctggttaagaccagacctaagggagcggccctgttgttagtggtgtctgtgtgtgttgtcccgcttctggttctgccctacctgcactgccaatgtaggaactagttttrttctataaatatatatacaaattgaagctcagaaaacattttttcacaggccaggcacagtggctcacgcccgtaatcccagcacttagggaggctgaggcaggtggatcacttgaggccaggagttggagaccagcctggccaacatggggaaaccccgcctttactaaaaatacaaaaattagctgggagtggtggtgtacgcctgtaatcccagctactcgggagcccgggatgcggaggttgcagtgagccgagattgcaccactgcactctagcctgtgcgacagagtgagactccgtcccaaacaaacaaaaaaacaaaacactttcccacagaaacaatgctttaaataatctcagccaggcatctatcttcckygtacaaagaattagtgggcccagtgtattaattaactcaagctaccactttaatccagcaatcttttagagcttccattgtgtatcagcagtaagctagggtttgaaaataaagcctagaacaagatagttgtgattcctgcttctgtggggtttgtaggcttccaaaggagcaatgatcattcattagttcaacaaatactgagggcccactatgtgccaggtgctattctaggcacttgggyatatcagtgtacaataaagatctctgagcaagtccagtggattgtgcctgtaatcccagatacttgggagactgaggtgggagaatcgctacagcccaggagttaagaccagcctgggcaacatagcaacratcctgtctctaaaaataaaaattttaaaaattgtactggagaggctgaggcgggatgattgtttgagtccaggagtttgagactgcagtgagctgtcatcacaccactgcactctagcctgggcagcagtgagactctgtctcaaaaataaataaataaataaataaatagtatagcatgttagaaagcgggaagtactataggagaaaaaaatgtagagatgaataatggggatgaagattgacaattatctaattctgattgtgagcatacttagcctcattgatcttattacaggtctgtgtacaaccttaggcagtacctgaggcatgagagtgtgataatagtagagcgtrttcagcaagtgtaagaatgtttgcatgtatggtcggcccggtaatcccaggattttgggaggccttggtgggcggatcacttgagattgggagttcaagaccagcctggccaacatgatgaaaccctgtctctactaaaaatacaaaattagtcctgcatggtggcaagtgcctgtagtgtcagctgcttggaaggctgaggcagaattgcttgagcccgggaggtggaggttgcatgcagtgagccaagatcatgccactgcactctggcctgggcaacagtgagactctgtctcaaacaaaacaaaacacacacagctgggcacmgtggctcaagtctgtaatcccagcactttgggaggccgaggcaggcggatcacctgaggtcacgagttcgagatcagcctgaccaacatggagaaaccccgtctctactaaaaatacaaaatgagctgggcttggtggtgcatgcctgtaatcccacctactcgggaagctgargcaggagaatcacttgaacccgggaggcggggttgcagtgagctgagatagtgccattgcactccagcctgggcaacaagagcaaaactctgtctcaaaacacacacacacacacacacacacacacacactcactgtccttgcttccataggatctattcctaggagccttggcaatttaactttatggagaaggataagtaggatgctgtgttcaatagttagtaggtcctcattaaataagtttcctttctatccagaaacgtactttaaaagcctcatgttattgtggttggagaagtcaactttgataaattggccatttacttactttttgacttgtgtggtggacttggactccttttkcttgatggtagtgatgagggcaagaatgtcatctagacataaaggacctgatttcgcataactgaaaatttagtgctggaaaaattaagattaccatggcaaaatactcttcaaaattacacaatttagtgttttcaaaggcttaagtggagcttttatgctggatttacgtgatgaatggaataaactgattcaaacattagaagggacatgcttaaaaaaaaaacctaccacaattaaaattttggaacatgatcttaaattcctgtgaaagggcatgaagagtttgtgtgtgtgtttcgttttttgagacgaagtcttgctctgtcgcccaggctggagtgcagtggcacaatttctgctcgctgcaacctctgcctcccaggttcaagtgattctcctgcctcagccccccgagtagctgggattacaggcacctgtcaccacgcccggctaatttttgtatttttagtggagacgggttttcaccatgttggccaggctgctctcaaaactcatgacctcgtgatcccccccaccccccgtgcctcggcctcccaaagtgctggattttacaggcatgagccaccttgcggtatgttaatttgggggaaaacaacagggacaattggggaaaaattttgttttgtgaattaccaatggaagaactaatcacaggctaagcaacatgcttacggttgaatttgccaaatttaagatgtacatactatgatgtagcatgtgtatttatttgcacatgcagtgggacaattcctacagttgtctcacactgctgtagattattagcaactccatcctgcagtgacatcgcttttctgaattctatagcacttttcacctaatcctctgattagtctgtattttccggttcaagtgtatcttgtttttcgtttgctccacttcccttgtcccttgcaccccactaacaggaaaattcctggtggtcaaaatggctctaattctttttgtatacccgggcttaattcaataggaattgggataacttttcaatatttaaaaaatttgcactgtgaaaacgtatattttaaactctttctacaacttttcatatttgaagaacatatggcaggaagtggatgcttttgatgaagccaaaagaatttttttaacttctattgctaattaacaaggaggtggccgcgggagctctttttttttttttttttttgagacggagtttcactcttgttgcccaggctggagtgcagtggcgcsatctcagctcaccgcaacctccgcctcccgagttcaagcgattctcctgcctcagactcccgagtagctgggattacaggcatgcaccaccaggccccgctaattttgtacttatagtagagacggggtttctcaggctggttcgaacttccgacctcatgtgatccacccgcctccgccacccaaagtgctgggattacaggcgtgagccaccgcgcccgggccaggcgggagctttaggtcttattttatcttgctctgcccccgacatcgtggtgagaggggaaccttcctcatatctgggcgctggcctctccgggcttggragagaggaactcagtgatcatagagctggccgaatgccggggtagaggggaccggaagttgtttttttcgcccccgcccagcggccggatcgcatctcagctggttggctttggttagasctcccgtcagactttmgttcggccctaggatttggtakccccgaagtgtgggctctctccagtaccagactcatttcagtaccagcctttgggaagtcgtgtgaatacctcggtctcttagccacagggatagaatggcggcctgacggagccgcggcgccggcgaagtcgctgaggcgcgagctggaacccccagaccagctcaaacgggagccaaamctcgaagcttggaagaattagcaggaaatggcggatgaggcgttgtttttgcttctccataacgagatggtgtctggagtgtacaagtccgcggagcagggggaggtggtgagtgctgccacacaaccttgaggtccttttgcggtgacacaccttgtttcccctcagtgctttccttcaacccctgtcccatcgccacccgacgcctcccgaggtgtacacaaaatggtccacctccaggtgtcctaaaccctagaacctgtcagttgtctcctttgaaccgtcatctttcatcgttttctctttcgtatcttcttctatttgattctcttttgtctattcccgtacgtttgtcttgcacgccacagattttggtacttttagtgttgtccctgccrttatttacgagagggttaactgcagagcctacttagttttgctggcacttccagcacttgagccatgcactggacagacctgtgccaacctgagaagcctgtccctccttcctcattcctaatgctcagtacaactccacacaacttgagacctgaagcctaatgaaggttgagtttgcaaaggaaagtttgcaggcgttaggataattagggaacataatttaaattaattatttcagaaagtatttatttagtgcccttatgtcagagcgatttctaggtgccagggatatagtagtgmatgaaacaatggccccatccttgtagagatttttttttaatctaatttaatccgaaatgtgatagtatgtrgcggttacttmtaatatgtgggagtccttattcaatcattgtgggcctgycactgctgacactgctagataaattaaataaaataatactcctgcctcacagtatttagggaatagtgatttaatgaatagttaacactgagtattggctggtagaatcatggagttgtaacggattttagaaatactccaaagtcatgctcaagtcaggagccctttctttaatgctattgataaaaaatgagtggagagtggggataggaaatgtatcctaggcaaagataaagtggtagaggtatgaaagagtggtggatttaaatacacttaagcatttctttggactagactgaatagagagtgagaagaattgagaggtgaagttagaaagctttgtgtaattaaagaattcggatcttttcgagggaatatttttaaggaagggaatgatgtggaccatttgcattttagaaaagtaatccagtgtttgggctagagagggaagatccttgtagggggaaaatcctttattacgggagtcactgcaggaggagatgaagatctggattaagacagggatagtgagaaaaggagataacagatttgaaagttagaaagtggaattctgtaggccttgtttaaggatgggagtgggagttgaaaattatcgtcaggttttcagcttgagcagctgggttggatggtggtactrttaatcagaaaaggaaataaaggagaagaaaaaaataaggaggtaagataatgagttatttcggggcaggttgaacttttgaggtgcctgtatgacatccaaaaaaaaggtactgccagtttgcacaagaaggataggcaggatacatttggaaggttattggaaatgaagcgaattctattcttattcaaatgacccatctataatagagatttttttcaagtcacaaacttctgactttattattgacctcaaggtttactgtttgtgcaaagctagccttccttttccctctagaacagttaacacaccccttttacttttttgtcataaccccygatccccccaaaccacttgcgtattcagttctcttcattctcccctcccttcttacctttcctcttctctctctctctttttttttttttttagwtggagttttgttcttgtctcccaggctggagtgcagtggtgtgatctcagctcactgcagcctccgcctcttgggttcaagcgattctcctgcttcagcctcctgagtatctggaattacaggtgccggccaccatgcctgactaatttttttgtatttttagtagagacggagtttcaccctgttgaccaggctgttcttgaacttctgacctcaggtgatctgcccgccttggcctcccaaagtgctgggattacaagcgtaagccactgcgcctggcccttttctgactcttgtctagaataatattttttcttctttttaaaatatcttttttttttcccgtgggttaatcctaaataaaatgaacagagctgttctactcaggcctgataattttaagagatggactaacatacaagagaaaggaagttcatagttttgaatcatttaagctaaaaataactttctttttctactgcagtgtatttatgatgggggggaaaattgaaagtacataataagcaaaaattatataaataacagttatgtggtagtcttcataatcagaacccatactgaaatacgggtatataagggttcacattagtgtccatactttgagtgtgcttgaaatttttcatcatgaaaaatgtaaaagatacataatcctgtcatccagaggtgatttttagagatttttttcagacataaaaagatctgtaaaaactatgttgtttatgtctgaaaagacctataaaatccatttctcgctgacaggattatgtgtctttttttttgtttttgttatggaaagtttttttaaatgaaataaagttttataaattttcagtatagcaaaataaacttccataagacttgaggtgagataaaagaaagaaacagtgttctaaccctccaaatcaaggtttttcaaactatgcttaaagaggaattctcttaaaatggactaattgggcatttctcaatttatggtgaatggattttgaaaggctaatggataaaatgttctcaagttgaatttttcttaaaaatttggtgcctactcaaaagtgcatgaacaagtagcaaaattaagtagtagggcttaaktcaaaagctcatgtgatcataggatttgaaagtgtctgcrtataagcatattgtaactgcccagtgggttcttcttccccactgcccaggtagagctgatctatcaagacaggagaattgcaataaggagtttatgtagagctgctaaatgggagagcagagttttattattgctcawatcagcctccccaaacatgcagagtctagggtttatcaaggatagtttggtaggctgggggctggggaatgggtgctcctggttggttggggatgcagttacagaggtgggggccagaggaccagttggagtcatccgaaatgcaaaagtctgaaaagacatctcaaaaggccttttttaggttctacaatagtgatattatttacaggagtaattggggaagttacaaatctgtgacttccagaataatgtctgattatcatttaactacctacattttagcagaattcagacccctctcataagcctaaccttatagtctttcattagttttgcaaaggtgatttagtttcgggaagggctattatcattcttgctttaagcttacactataaactaaatttctcccaaagttagcttgggctgcatccagaaatgaccaagggcagcttggaggttaaaggcaagatggagttgattaggtgagatctcttttacagtcatgattttcttactgttacaatctttgcaaaggtggtttcaatagttcctgctaataaatatgttcctaggtgattctacagagagcagattattccaaaaagagcatcatgatttacagacacttattctagctgaacttgtttttttgttttttttttttttaagagacaagtctctgggttagtgtggtggctcacacctgtaaatcccagcactttggaaggctgaggtgggagaattacttgagcccaggagttggagaccaacctgggcaacatagtgaaacagtgtctctatttaaataaaaaaaaaaagaggctggacacggtggctcaggcctgtaatcctagcactttgggaggccaaggcaggcaggtcacaaggacaggagttccaggccagcctggccaacatggtgaaactccgtctctactaaaaatacaaaaaatagctgggtgtggtggtgcacgcatgtagtcccagctactcgggaggctgaggcagaagaatcacttgaacccaggaggcggaggttgcattgagccgagattgtgtcactgcactccaacctgggtgacagagcaagactcagtctcaaaaaaaaacagagagagagagagagagacaatgtcttgctctgtcatgcaggctgaaatgcagtgttgggactttggctcactgcagccttgacctcctgggcttaagtgatcctcccacatcagcctctcgaatagctaggctatgggcatgctaccatgtccagctaattaaaaaaatttttttttgtagaaacagagtcttgctatgttgctcaggctggtctcagactcctagtctcaagtgaccctcctgcctcagcctmctacggtgctgggattataggcatgagcactgcgcctggcctcatcctaagcatgtttgagaagtgtggagaatagcagaaaaacygaagatagtgatacgtacagtaatagatgtatgtacagaattttacgacagcatagggcctaaggaagtttcagggaagccatctgggagaatgtaatacttgagcagaatttaaagaatgtgaatgccaggcgcggtggctcacgcttgtaacccagcactttgggaggccgaggcgggcggatcacaaggtcaggagatcgagaccgtcctggctaacatggtgaaaccccatctctactaaaaatacaaaaaattagccgggcgtggtggcggtcgcctgtagtcccagctactcaggaggctgaggcaggagaatggcgtgaacctgggaggcagagcttgcagtgagccgagatcacgccactacactccagcctgggcaactgagcgagactccgtctcaaaaaaaaaaaaaaaagaatgtgaagtctagggaatagcacataaaaaggcagggagacagaagagaacatggcactctggagttgctgcagaaatttcagagtggtaaaagggaaggatgtttgtgaatttggttaactagccaggagtctttaaggaaaggacataccatgatgccatgctaaggagtttggactttattttttgtttgtttgttggtttgttttgagacaggatctcactctgttgcccggtctagagtgcagtggctagatattggctcactgmaacctctgcctcctgcactcaagccatcctcctacctcagcctcccaagtagctgggactataggtgcatgccaccatgttcacctaatttttgtaatttttttaaagatgaggtttcactatgttgcccaggctgccctcgwactcctaagctcaagcaatccttggcctcccaatgtactgggatttacaggcatgagtcactacatcaggcctggactttattttgaagraaggggagcrggtgctgaaattccagtagagaataacatgattttttttttagacagagtttyactgttattgcccaggctggaatgcaatggggtgaccttggctcactgcaacctccgcctcctgggttcaagcaattctcctgcctcagcctcccgagtagctgggatwacaggcatgcgccaccatgcccagctaatgttttatgtttttagtagagatggggtttttccgtgtcggtaaagctggtctcgaactcctgacctcaggtaatccgcctgcctcggcctcccaaaatgctaggaggcgtgagccatcatgcccggccgagaataacatgattttttttagaaatttactttagtagaagttacactaccagaaatatagaagatgacacaaagtaggaaaaaatgagacaagaccagttggaaagctatagctaaaaaccaggagagaaatgataaggctttacttaagaagtaagggtagagagagacgatgaattttgaaaagcttgtaaaagataggctccaccggactacagtgtatggggggttgggagcacaggggtgaagaaaatggaagttttctggttggagtaactaggtgaatggtggtgccattaatgaagttaggaaattttggaggcagagcaggctgaagacattaataaaatgaatatcatttgaatatgcatacttcgaaggtcctgtgggaccactagatgtctatgcccaataaagtctgtactagaaacgcagatttartagtcacagcaccataagcagagtgcatggttccttagaagaaagtttagcaaataataagccctatggtttccttagtgggagacaaacagccttcagaatatacaaaaatccctgcctttttggagctttattttagcagagaggggaacaaggggcacatgggcaatataaaatagtaaaatgtatggtatattaaatggtgaaagaagttctgtggagacagattaagcaaggaagtgggactgagtatcaaaatcaatttttagaaggtttgttaaagctgattagcggccccatacccagagtttctgattaagtaaattgggagtgggactagagaatttgcaagttcccatgtgatgctgatgttgctggtcttttttttttttttttttctggtgaygaagtctcgccctgtcacccagactggagtgcagtggcatgatctcggctcgctgcaatctctgcctcctgggttcaagcgtttctcctgcctcagcctcttgagtagctgggactacaggtatgtgccaccatgcccggctaattttttgtatttttagtagagatgaggtttcactgtgttagccaggatgatctcgatctcctgacttcgtgatccgcccrcctcagccttccaaatgctgggattacagatgtgagccaccacacccagccaacacatttttaaaatcactaggatagagagttgccaaaggggtatgatgttgcacttttaaagaagatggttaaaatgggcctaagatggtgacatgagagtagactcaaaggaagtgagggagttggttgtgtgactatctggaggaagagttgatgcaaaagcccctggaatgtgcctggcatgtttaagggacggggcagagtgcatctgcagaaggttgaagccagagaggtatggggtctggattgtagaggacagtccatcagtcatccataggatttggatgtgttcagcatagaggtactatttcaagccttaagattgaatgagattgtcaaagaaagagcaaagcaatctcatgatttaaggcaaagtgtgataatcagctaagacactgagaactgggaagcctggatgattctgagacattttgaagcaaggaacaatagaacttagagcagaaagcaaatgactcagggaaaaacatcaaaggtgataccaggttttataacctaggagagaagaatgattgaaattgggataaaagggagacgaggagtaattaggaagaggatttgatttctgaaaatcaattataagcagtagttccctgtttatcctgttgccttgtgccaggtgcagtggctcacacctgtagtcccacagctttgggaggccaagccaggaggatatcttgaggtcaggactttgagaccagcctgggtaacagagtgagatcccatctcttaaaaaaaaaaaaaatagccaggcatggtgatgtgcctgtagtcctagctacttgggagactgaggtgggaggattgcttgaacccaggaatttaaagcttcaatgaaccatgatctcgccagtgcactgcagcctgggcgacagagcaagacttgtcaaataaataagtaaatagcagtttggtcttttgttggaggaacgtctattcttagcttggacactgcggtttttccttgggcagcagaagcaatgtggcgattgaagaagtgacctaaaactttgatgttaggtagaagcagatggcccaagccaagacaagtgcttgtaaatccactggtgggagcccctcctcctaacagcaggttattaacgctgccagaaaaaaagtgtcccctctaccggtctggtgaagaaacctcatcgctacgggcctgggactgtggcacttctagagattctcgttaccagaaattgacctagcttctcatctggaagctgcctttctagaggttggtgagagagatcacccaggatttcaaaaccaactttaggtttcagagcacagtcattggggtgctgcaggaggctagtgaagtgtacctggaggctagtgaagtgtacctggtgggttggtttgaagatgctaatttgtgtgccatctacggtaagagagttggctctcatgcccaaagacatccagttggctcgccagacacggagwgagcgagcttaagtgaaggcagattttaaggcattttatatgaattctgtaaaatactttggtttaatttgtgactttttggggagaaattatttataatatgttgcatttgtgcttaagtcattccgtcttttgggatgaatgtgaaaagtgactgttcatagacctcagtgacgtaagcactgttgctcaggagtgacaagttgctaatacgcagaagggatgggtgacattttttcattctcrtgacgcatgtttctgtaagttaatgacttgttaggtagctattaaggaactagagttgataartaaatgtgtataggttccttttgcaatataactggttattacttgatccaagtgtttaacatttggagctaagtctgaccatacattactgtgatagaatgtgggccttttcaagggtgaagatacaagccttaaccacagtataacttgcagtttccttaaacaaacaaagaaataaaaacctagcatggagtacattatgtgcatttataatagctattttaaatattgtagtgtcaacattcaaaaattaattcttttacattcgcaaatggtggggagtcttgtcattaaggtgtgtataacttagaatccacttggttttctcctaactggactgcatttgttttcatagtagtaaaatgttatgtgtattacaccttgcataagtcctcattctactacgtgttaactaaccctctagatgataatgcagatgctaactgtgggattttatttrtaagaactctagaataaataccagttattcctaccaacatcggctgttactaatattctgaagtagttagtgcaacttttcattgtgttgtggttggtctcctaagtaggttggatttttctcctcttctaagagaaaacaatagtgaaattattttctttctcttttctctctgtttctgtctctttctctctctctttctcccttcccttyccttccctcccctcccctcccctcttcttttcttttctttctcttctcttctcttttctttctttcatggggtcccttgctcaacctgttgcccaggctggagtkcaatgacatgatcatggctcagtgcagcctcaacttcctggactcaagcaatccacctgcatcagcctccaaaatggcacatgctaccatgcccagctattttatttttacttttagtacagatgtggtcttgctatgttgcccaggctggtcttgagccattgagctcaagtgatcctcctgctttggcctcctaaagtgctgggattacaggcatgagccaccgtgtcttgaggggtttgtttctattaaaagacttggtgtcagggaggagcacaaagctttaacccattgaacctctgacagttaagatggtgttgggttaggttacatctggttactatcctgggaaaatcacttctatagagatggccttccaagtggttttaaaatgtatctttctgtctgggcgcggtggctcacgcctgtwatccctgcactttgggaggccaaggcaggtggattgcttgaggtcaggagtttgagaccagcatggccaacattttgtatttttgtattttctctactaaaaatacaaaaattaaccaggcatggtggtgggtgcttataattccagctacttaggaacctgaggcaggagaatcacttraaccctgtagatggaggttgcagtgarccgagatggccccactgtactgcagcctggatgacagagcgagactccatctcaaaataaattwaaaaaatgtatccttctattgaagtttttaggttaatcatgtatatgttgactaaattatgaattaacttgtttatcaaaaaaaaagtaaaaagtaaagtaagtaaaagtaaagtaaaataaataaaatcaaccttataattcactttttcttaaactgtttcagggaaaaaagtataaatgtttacattaatatttttaaccaatcttgtaaaacaatttctgaatactawcatcctagcattctaaaagtatttaaaactattgttttttaaaataggaaaacggacgatgtattactaagctggaaaacatgssgtttcgagtgggacaaggattgatagaaaggtgagcaggttggatttgaaaattttcttgcaggtaggttataaacaaaggtgatctatttcaaaagattgcataaaacttgggatattttaattttaattcctgaatgttattctctttacttcaaaaattaaaatttctttttagatccaatgccatttaactcatttattcaaattttattttaatgtttaaagaaaatatatattttatatattttagactttcttcctgaagctattttagactttattcctgaagctattgaagcaaytatctaaaatcttactgcattttcaacttaagatctgctaggttctttaacctgcatagaatttttaagtacataggtttgaaataactatagtctatgtttatgcgtgtaattatctttgaacttataaatcagttctttttagtatttctttctcactacctgaatagttaaactcggagtatattttatataacaatgtcatgataatgctcagctctttgttcttttgtggttttttgatgtgctagaatgcattgcacctgaaattttggctataatgttasactaatttgaggcctcataatttatataacataatgtgaatccattgagataggatcatgttacctggtgcttatgactttattagtgttaataaatgttcagccaggtgtggtggctcatgcctgtaatcccagcactttgtgaggccaaggtgggagaatctcttgagctcaggagtttgagaccagccagggtaacaaagtggaaccctgtctctacaaagatatacagattagctgagcatggtgacatgtgcctgtggtctcagctgctagggaggctgaggtgggaggatagcttgagcctgggagggaggtagacgttgcaatgagccgagattatgctattgcactctaacctgggcgacagagccagaayctgtctcaaaaaaaaaattaaaattaaaaaacccaataaatgttcagtgctrttctggcatttggaaattagttaataattagtccctcttgctttttttggaggagaaatactgtattacttctagttgatctttttaggtttacaaaagatactgcaaggttcaaggatgagttagatatcatgaagttcatttgtaaagatttttggactacggtattcaagaaacaaatcgacaatctaaggacaaatcatcaggtaattaaattaattaaggcctatattttaaagtcctttaacttgatataaatatygtattttagtgacttatttaaaacctaaaataatttctrgttaactttggaatatgtttatgttattaatgagttattagtttttttcttctaatagtgtgaactgaktaaagacaaagggacagttatcagtaatgatagctgttcctttcacccaattawatgctatgttaagttttttaaagtagcataagtcaggatgagaatagcttttactatttggttccttagttactgttaattagtggtaataatatgcagaaccacaaatatatcacctttatgtctttagagtcatttcttttttttgaagaagaagaatttggattattttaattatttttatatacagaaaactcaacagtgtatgtttaacccagtttggtgtcaagttctttagcctttgccttttcctgcttgacaattcaagccacagacttgagacccaggacattgcctccccagtgacagtggatttcgttttgtctgtcgtaattggttctgatagcttccaccagctgaacctaagctccattgtcctctgagttaatctgtgtaaaggcgacagtggtgcgggtcttcttgtggattagacatcccagtcttgccttccccttgataatgcggtaagggacccccattttatgacacaaggcaggcaggaagacagccacctcgatgggatccacatagtgtgcagtcaccaccagctgagccttcttgttctcctccaaggtggagatggtgttaactcctgctcggaggacaagtggtctcttagtggggacatcccctttgcctgcagctttcttttcagcccgggccaatagcctctgcttattttcttgctttgtctttggtctgtacttgtgggccagcttaagcagctaagtagctatttggcggtgcagggcctgggtgaactggttaattgtaggaggcactttcagytgcttacagaggatggctttgtgccactgcaacctgatatagcggggccatttcacaaagtgagtgaggtccatattgggtggatgtcctgtccaatgccagaattcttaggccttttctcaaacaggggattcaccactttctttctttctttytttttttttttttttgagatggagtcttgctgtgttgcccaggctagagtgcaatggtgcgatctcggctcaccacaacctccgcctcctgggttcaagccattctgcctcaggctcccaggtagctgggactacaggcatgtgccaccactccggctaatttttgtatttttagtagaggtggggtttcaccatgctggccaggctggtctcgaactcctgacctcaagtgatccgcttgtctcggcctcccaatgtgctgggagtacagacgtgagccaccacgcccaaccaggattcaccactttcttggcctcctgtttcttcatgacaccaagggccagagccacctccttcctcttggcctttccttttggcatcttgggtggcaggaagagattctttatagtcatttctaaagtctaatttatagagcattttactcttaaataactcctggattattactgctgtcatattttctactcttaaaagattttcttactacaaaattaatagattacatagaaaactatgtatttattaaaattttaaaagggagacagagtctcgctttgttgcccagactagtcttgagctcctggactcaagtaattctttggcctcagcctcttgcatagctgggattataggcatgcaccaccactcccagcttcattagattttattttatgaacttcaaggaaatacttagagtagatttggaattttgattaagtaaaaaattaaatgtatctggtactctcaataggataattcatttatttatttatttttaattagagacagtgtctcactatgttttccagactggtctcaaactcttgggctcaatggatcctcccgccttggcctcccagagttctgggattacaggtgtgagccactgtgcctggcctggaattcattttgtaccaactttagcttggaattactggaaatgctaataggaagaaatgactatgatttttttactctctagacatgatttactaatatatatcagctggctggacatggtggctcatgcttagaattgcagcattttgggaggctgaggcagaaggattgcttgagctcaggagttggagaccagcctgagcaacatacttagaacctatttctacaaaaaacttgaaaaaaatttcaccaggcatattggtatgtgcctgaggtttcagctacatgggaggagttcaaggatacagtgaaatactacacttttgcctggataacagcaaaattctgtctcttaaaaaaataaagctgggcgcggtggctcacccctgtaatcccagcactttgggaggccgaggtgggcagatcacctgaggtcaggagttcgagaccagcctggccaaygtggtgaaaccctgtctctactaaaaatacaaaaattagccaggcataktggcgcacgcttatartcccagccactcaggaggctgaggaaggagaattgcttgaacccgggaggcagaggttgcagtgagcctagatcacaccactgcactccagcctgggcgacagagcaagactctgtctcaaataaacaaataaatccgggtgcggtggctcacgcctataatccsagcacttcaggaggccaaggcgggtggatcacctgaggttgggagttcaagaccagccctgccaacatggagaaaccccgtctctactaaaaatacaaaattagctgggcgtagtggcgcatgcctgtaatcccagctacttgggaggctgaggcaggagaatcacttgaacccaggaggcggaggttgtggtgagctgagatcgagccattgcactccagcctgggcaacaagagtgaaactctgtctcaaaaaaataaataaataaaaataaaaattaggtcgggtgtggtgatcatacatgtaatttcagcactttgggaggctgaggcaggaggattacttgagccctggagttccagaccagcctaggcaacatagggagaccccctttctacaaaaaattaataaaactagccgggtgtggtggcatgtgtctgtggtcccagctactcggaaggctgaggcaagagaattgctaaacacccaggtgtttgagggtgcagtgagctgtgattgcaccaccacactccagcctagacaacagagtgagagctcatgtctaaataaataactatacaaacaaacagcttatttcatgtggacatgtattaatgattccatcgtactagactatgagtttttaaggatagggactatgtctcagacagtgtttttatcttcagtgtataaaaccgttcggtatacattagtgttgtgaaaatactgaactcgcaactcttcagcttgaacattgcaaaactccttcatttaaacaaaatttgaccaggctgggcacgtgggcttatgcctgtaatcccagcacttcgggaggtcaaggtgggcagattgcttgagcccaggagtttgagaccagcctgggcaacatggcgaaaccccatctgtacaagaaatataaaaattagcagggcatggtgatgcacgcctgtagtcccagctacttgggagcctgcggtgggaggattgattgagtctgggagttggaggctgcagtgaggcgtaattgtgccactgcattctaccctgggcgacagaggagaccccgtctcaaagaacagaaaaagaaaacttggccaatgggaaggagacttttaataactttaaaaaacacttaaattgtttcataagaataaaataattttaaggactgctaggtacrttgactttggattttttttctatttttggaacagggcatctatgtacttcaggacaacaaatttcgcctgcttactcagatgtctgcaggaaaacagtatttagaacatgcatctaaggtatttaatggaatagaagttggggtttttgttaatagtaggactacagggaaaagtacagtgctaatcataacaaactattgaattaaaaatatgttttaaggtgttcttttttgtttaaagagttttctatgaaatgagagacatgttacaataacactaaactgtagctaaatagtcatagagtgaccaattaaagaaacactggccgggcgctatggctcacgcctgtaatcccagcactttgggaggccaaggcaggtggattacctgaggtcaagagttcaagaccagcttggccagcatggggaaaccctttctctactaaaaatatgaaaaatagctggacgttctggcgagcgcctgcaatcccagctattcgggaggctgaggcaggagaatcacttgaacccgggaggcagaagttgcagtgagctgagatcgtgctatcattgcactccagcctggggtataagagcaaaactccatctcaaaaaaaaaaaaaaagaaaaaaaagaaacactataactaaatracagtgaaatgtagatgtatggtagatcactttttttttttttttaagacaaggtcttgctctgtcatctaggctggagtgtagtggtacaatcatggcctatcttgaccttgacccccccgggctcaagtgatcctcccacttcagtcacccaaggaggtaggactgcaggtgtgggccaccatgcctggctaatttttaaaaaaattttttagagatgggatcccacgatgttgcccaggctcgtcttgaactcctgggctcaagtgatcacctcacctcggcctcccagtgtgttgggattacaggtgtgagccactgcatccggcctgattgcctattttctatatttttggggtatccaggctctaattacatttttatggttaatgtgtatattttctctcttttttttttttttcggacagagtgtgagactcactgcaacctctgcctcctgggttcaagtgattctcctgcctcagcctcctgagtagctgggattacaggtgtgcgccaccatgcctggctaattttttgtatctttagtagagacagggtttcaccatgttggcgaggctagtctcaaactcctgacctcgtgatccacccacctcagcctcccaaagtgctcggattacagacgtgattacaaaagccacccaaaatgctgggattacagcctcccaaagtgctgggattacagacgtgattacaaaagccacccaaaatgctgggattacagcctcccaaagtgctgggattataggccatgcctggcatattttctcttttttactaacttcttagtttaatatttctggttctcacttaactttttgggatcttggtttcttcagctgtgaaaagagtaagttggaccaattcagtgatttctaactattttgagttatggacatctttgagaactggaacacctttccccataaatacgcacatatacatggtttttattttcataggggtcacaaattccccgattaagaactcttgggatgaacaatctctaaggcctcttccagcttaaaatttcatgactcagatctagttacttattagtrcccatttatgtatattatttataagataatattttatattattcgtagataatgtagtatgttgaacatcatgcagtatagatgtgggtaatcaaaaattccctgaattgctaatttttcaatccagttcttgtcatgacttttggttttgtagctcagccctattccctttctttgtttctatatgacagggtttctcaacgtccaaactgttgatactttcaaccagataattctttgttgtggcaagctataagtcttgaacaagtcaagattcttggttgtaaataggggaaagaaattctgcttgtaagctaacaaaattgataagctcaaagaataggcaataaccaggggaggttaaggcagccagtaagatagccaagtcactctgcagactgtatctacttagaatcctgcaggcagcagggactgtagacacaaactacctttactgcctccagaactaattctgatcagtttctggcttgtttttgtcactgagtctagattcacagtcctggactggagtacttmattggctgagcttaagtcttaagtcctacrtccatgctttagtttccagggagctgggaaatmtatcaatatttttcagtaatttgaacagttcttcaaaatcctttttttaaacaggaatgacttactgatgataaatcatgtaatgttgtatttatcaatagctttactattttagtaaatccttactatttttaatgrttttttttccttttagtatttagcatttacgtgtggcttaatcagaggtggcttatcaaacttgggaataaaaagtattgtaacagctgaagtgtcttcaatgcctgcttgtaagttgaattcrcctttcttacaaatgttttagtaatttgttttcaggtctgtttttttttttaatttaactgagaggaaatttaaaatgctgaaactttcattttagttttatcaatgtaacactttagtgtagtaatatgtagcatactacattcatwttcagtaatttttgaataatggactaaaatccaaatttataagacaatttaagggatgatttttaacttttctaaagttattcaaactgtaacttttttaaagatattcttctgaatatctcctgcagtgttttaagatagcaaatttccctagaacattgaaaatgctattttttttttttttttttttttttgagacggagtctcgctctgttgcccaggctggagtgcagtggcacaatctcggctcactgcaagctccacctcccgggttcacgccattctcctgcctcaacctcccgagtagctgggactacagttgcctgccaccacgcccagctaattttttgtatttttagtagagatgggtttcaccgtgttagccaggatggtctccatctcctgaccttgtgatccgtctgcctcggcctcccaaagtgctgggattacaggcatgaaccaccgcgcccggcccgaaaatgctatttttaaacaattgtttaggatatgtctattatatcaagctaagtaaaaccaaatattcttttatcactaaatgtctccctaaagatcttttcaccagagctaccaaccaagaaaaaatggacttgagctttattgtatttcttttcaatttacaatgatcattagccatgaaatactgtacccaaatgtaggattcataaagagaaacaaaagtgcttactcaacaaaccatataatcatcccataaaaatagaattgactggccgggtgtggtgcctcacacctgtaagctcagcactttgggaggccgaggtgggcgtatcatgaggtcaggagtttgagaccagcctggccaataaggtgaaaccctgtctctactaaaaatacaaaaattagctgggcgtggtgacagacgcctgtagtcccagctactcaggaggctgaggcaggagaatcacttgaacccaggaggtggaggttgcagtgagcagagatcgtgccactgcactccagcctgggcaacagagcaagactccatctcaaaaaaaaagaaaaaatagaattgactttattgaatattatgaagaatgcgaaaaagtttttgacatagcagatttcttgactgaaactatttcctatatggaacagaaaattgatgtttagacttgttttctttgtatctaaaatcaaagaattatttgtatttttttttttaggcaaatttcaggtgatgatacagaagctgtagaacatactgaaatgcaaggcttcaacagtgtaaagagataaattattcatgtaaaagtatttcaagtagtgatgatttaattacattgttcgatgtttgtacaggagtaagcatgtatttttatcaatttaacacagatcaaaggagatgaagggacattctgccatgacatacacttaaccaaaactattcaaaatgaaaaccggatttcaaataaccagacaccaagatgcagggcccttattttaaacctttttatttggttagagtgatatgtatttagccatagatggagaaacaaagctcagggtttgttgaattagcatgagagaaaattatgtaccaacagaattatttgtgagaagaatgaacaaattttgataaagtatgaatttgttttattttaaaaagcaaacatactaaattttttttattttattgcttataatttattaagaatgtttacacctgtataaggatttcatatatacattgtatgtgtgtatatataaatacatatatgactgcctaaattgtttataaatttaatttttctttaataggtttcattccttcagagctccattaatgtaatcaaaatgaaatatagattagtttaaatgtgaattcagtgactctagggccaaagaatattaggtatgtttggaaagaatttttgtatttattcctgttacagttttgactttcaacttctctccccgtgcatggaagtcctggtaaaggatctaacatctttattcccttctttcctcttccagctgagcagagttggataattgaattagtcattctgacattctttggaccatatcatcttagtggtttggggtcagtgctcatctgatawatctttcttaccacctcttctacttactttctcttacttaaattatctggcataagcagttatctccagcttttgttagaatcttgcatgttgattactaaaactatactttgtttcccatttatttattacccttttgcatgtatttgtgtgacagggaactctgcagcagggggtgactgacacaccaaacaagatgtttcactgggtactctgccatagaaatggcagattaagaagattgactataccaaacattatattaaaaacacaraataaaaactataaaaatgtactttaggacattaaagaaaactcaagttagaagcataccattttcctttcatggaagggtacagtattacaaagataatttgtttaacttgatttattaaattctagttatgtgccctataatgatktttcagtcagtgacagacctcatatatggcagtggttccataagattacaatactgtatttttactgtaccttctttatgtttagatatgcaagtacttaccattgtgttacagtgtcctacagtattcactacaataatatgctgtacaggtttgtagcctaggagcaataggccatagcttaggtgtatagtagatcataccatctaggtttgtgtaagtacactctgtgattgtacaattttaaaatctcctaatgatgatgcatttctcagaatgtatcccctttgctaagcaatgcatgactgcaatcctaattctcacatgttttggggaaaaaattttaattttgaaaaaatttaggaaagttcctacyaaatatacatgtataaagtttattaaaagtcataatgacccaggaatagctaatgacacagaagtagatcaaaatagaacacaatagagaacttcaaaataaaacaggtgtgagaattgtgtgtgtgaaaaagctgggttcaaataagttggtttgttagacattcatatgcctacycatcagccatttcgttctcccttccttgctgacaaagccccattttttttttctttttttttggcctaaaactctgtatggctgccttgtgctatagaatagggtgcttccctagcctagagagggtgagtgttgattagattctgtgccaatcatggtaattggcttacttgatcatttgatggaatctaggctaacgagacaaaggaagtctgaaggctttgaataagaaattttctgttgctcttaacaattgatacaagttagggatttgccagcatccctcttctgcttctcagtgaagatatgtgatatggatgtttgaagctaatctgcaacagccttctgatggccatgaaaggacaagtatggagatgaaagctatcacactgagaatagtgggatgtagatagaaagcacctgaattgtgcttctgaattaaccaatccaggaactgctttacctttggactttttgttatgtgagatattctttatattgttccatttgctttgggtatatgtatattgttacttgtagccaaaaagaaacctctcttagtagaaacaaagggagagttaggttattcaaaaattagtatgggacarttgaatatgcctttttctgcgggagtaggtggggagaaacttaaaggttcacttgtaaaacaataaagtactaaagaaaatgtgataatactttcgtgattttgtggtggagaaggcctttccaacacacaaatgtaggaaatcataaaggaaaactataaaacaaagaaatgtagtaaaatctcttcaacaaatagtgttgggaaaactggacatccacatacaaaagaatgaaattggattgttrccttaatgccatacatagaaatcaacttaaggccgggtgtggtggctcaagcctgtaatcccagcactttgggaggccgaggtggggcagatcatgaggtcaggagttcaagaccagcctggccaaacagtgaaaccctgtctctactgaaaaaaatacaaaaattagctgggtgtggtggtgggcgcctgtagtcccagctacttgggaggctgaggcaggagaattgcttgaacccgggagtcggaggttgcagtgagccaagatggagccactgcgctccagcctgggcgacacagtgagactctgtctccaaaaaaaaaaagaaatcaacttaaaatggattgaagatttaaaagtaaaatctgaaactatacaattctagcagaaaacataggggaaaagcttcgtaacattggtcttggcaatkatctcttgggtaagacaccaaaagcaggcaacaaatgcagagatagacaagtgggactacatcaaactaataagatgcacagaaaggacagtgaaaaggcaacttagggatggaagaaaatatttgtaagccatatacactcggccctttctatcttgacggttcaaccaagaattcaaccatccttggtttgaaatatttgaaaaaaaaaaaacaaagacaaggcctggctcacacctgtaatcccaacactttggaaggccagagtgggcggatgacccgagatcaggagttcaagacgagcctggccaacatggcaaaaccctgtctctactaaaaatacaaaaattagttgggtgtkgtggcacatgcctgtagtcccagctacccaggaggctgaggcaggagaattacttgaaccgtggaggtggaggttgcagtgagccgagatcatgccactgcactccagcctgggtgasagagtaagactccatgtccaaaaaacaaaaagaaaaccaaagacaatataaaacacattttaaaactacagtatgacaatgatttacgtagcatttacagtgtgcttggtataagtaatttttttcctctctgtattgatcatgtggcaggtataagtaatctagagttttttttttttttttttttttttaaggcagagtttcgctcctgttggccaggctggagtgcaatggtgcaatctcagctcaccacaacctccgcctcctgggttcaagtgattctcctgcctcagactcccaagaagctgggattacaagcatgcgtcaccacacctggctaatttttttgtatttttagtagagacaggatttctccatgttggtcaggctagtctcaaactcccgacctcaggtgatccgcccacttcagcctcccaaagtgctgggattacaggtgtgagccactgcacccagcctagagatgatttaaagtatatggtggtgtggtggctcgcatctgtaatcccggcactttgggagtctgaggtgggcggatcacctgaggtcaggagtttgagaccagcctagccaatatgatgaaaccctgtctctactaaaaatacaaaaattagccgggtgtggtggctggtgtctgtaatcctagctacttgggaggctgaggcaggagaatcagctggacctgggaggtgggggttgaagtgagccgagatctcaccactgcactccagcctgggtgacaagagtgagactctgtctcaatcagtcaatcaatcaatcaatcaatcaagtatacaagatggcagagcaggccaagcaggctgggtgcagtgattcacacttgttagccaagcactttaggaggccaagatgggattggttgagctcaggagaccagtctgggaaatgtggcgagagctcatctcttaaaataaaaaaaaagttagccaagtatgtactcccagtttcttgggaggctgaggcaagatgattttttgagcctgaagggtttcatgagcatgggaggttgaagctccagtgaactgtgatagtgcccttgcactccagcctgggaccggcgagataagggattttctttctccctgggtatgttcaacctgtgaatgtacacaatgacgaggtcagggtgtagagtttatatgagggcttcagaaatttggcttagggccagatttcatgttttttwaccacagtaacaaaatgacataacaaaaagtttgcattgcagaaagcacaattttaaaaaggaaaattatttacagtgcataccacataagckaatatttgcaaatttttttgtaataatagagatgggtctccctatgttgcccaggccagtctcaaactcctgggctcaagtgatccacctgcctcagcctcccaaagagctgggatacaggcgggagccacggctcccagccacatatttgcattttaaaaatgcacgtataactttaaaacatataatttaactcagcaattccacttctacaaagttaacctaattaagtaaatgagtatgagaacttgtatgtataaggattttcactatttggttaagtgtccattgatggtactttattaaattatgatgctaacagccaggtgcggtggctcacacctgtaatcctagcactttgggaggccgaggcgggtggaacatgaggtcaggagttcgagaccagcctgaccaatatggtgaaaccctgtctctactaaaaataaaaaaattagccgggcgtggtggcacacacctgtagtcccagctacttgggaggccgaggcaggagagttgcttgaacctgggaggcggaggttgcagtgagccgagatcatgccactgcactccagcctgggtgacagtgatactccatctcaaaaaaaaaaaaaaaaaaaaattatgatgctaacggccaggcacggtggttcatgcctgtaatctcagcactttgggaggccgaggcgggtggatcacctgaggtcaggagttcaagaccagcctgactaacatggagaaaccctgtctctactaaaaatacaaaattagccgggcgtggtggygcatgcctgtaatcccagctatcgggaggctgaagcaggagaatcacatgaacctgggagsgggaggttgcaatgagccaagattgtgccatcgcactccagcctgggcatcaagagcgaaacgccgtcccaaaaaaaaaaaaaattatgatgctaacattcaaggaaattctgtgcagctgttaaaaaggatgaaatagatttacatgaatttacmtggaaagatgttaactggtatattaagagaaaaagttttgctacaggatactgcaaatgtaatatttaagtatatataatgaatatatacatagtgtcaaaaagactgaaagttaaaagtaaattatacagtagttctcttgaaactttttttttctttttgagacggagtttcgctcttgttgcccaggctggagtgcaatggcatgatcttggctcaccacaaactccgcctcctgggttcaagcaattctcctgtctcagtctcctgagtagctgggattacaggcatgcgccatcatgccctgctaattttgtatttttagtagagacggggtttcttcatgttggtcaggctggtctcaaactcccaacctcaggtgatctgtccgcctyggcctcccaaagtgcagggattacaggcgtgaactaccatgcctggccaattctctggaatttttgacattaagtttctatattatttgggatttttattttatttttatttttttgagagggagtttcgctcttattgcccaggctggagtgtaatagcatgaccttggctcactgcaacctctgcctcccgggttcaagcaattctccggcctcagccttctgagtagctgggattacaggtgcctaccaccacacctggctaattgtttgtacttttagtagagatggggtttcaccatgttggccaggctggtcttgaactcctgacttcaggtgatccacccacctctccctccaaagtgctgggattacaggcgtgagccactgtgcctggcctatttgggattttaaaataatcattcccccaatacagatttttttatctggagtgggaaaacrtgataaaacaaccagtgatttttagacttttttggagtcctgggattccacagggtgcctgatatggtttggctgtgtccccacccaaatctcaacttgaattatatctcccagaattcccacatgttgtgggagggaccaagggggaggtaattgaatcatggaggccagcctttcccatgctattcttgtgatagtgaataagtctcacgagatctgatgggtttatgaggggtttccacttttgcttcttcctcattctctcttcctgctgccatatgagaagtgccttttgccctctgccatgattgtgagaccttccccagccacgtggaagtgtaagtcaaattaaacctctttcttttgtaaattgcccagtcttgggtttgtctttactagcagtgtgagaacggactaatgcagtaaattggtaccagtagagtggggtgttgctgaaaagatacccgaaaatgtggaagcgactttggaactgggtaacaagcagagattggaacagtttgaagggctagaagaagacaggaaaatgtgggaaagtttggaacttcctagacttgttgaatggctttgcccaaaatgctgatagcgatatggacaataaatccaggccgaggtggttcagatggagatgaggaactccttgggaactggagcaaaggtgacttttgtgttttagcaaagaaactggtggcattttgcccctgcgttagagatttgtggaactttgaacttgtgagagaggatytagggtatctggctgaagaaacttctttttttttttttttttcgatasagtcttgctctgtcgcccaggctggagtgcagtggcacgatctcagctcactgcagcctccgcctcccaggttcaagcaattctcctgactcagcctcctgagtagctgggattacaggcacacaccaccatgcccggttaatttttgtattttttttagtagagacgggggtttcaccatgtgggctaggctggtcttgaactcctgacctcaagtgatccacttgccttggcctcccaaagtgctgggattacaggcgtgagccactgcacccggcctggctgaataaatttsttttttcctttttcttttttttttttgtgagacrgagtctcactctattgcccaggctggagtgcagtggygcgatctcggctcactgcaacctctgcctcctgggttcatgccattctcctgcctcagcctcccgagtagctgggactacaggcacccaccaccatgtccagctaatttttttgtatttttttagtagagacggggtttcactgtgtttgccaggaaggtctcgatctcctgacctcatgatctgcctgcctcagcctcccaaaatgctgggattacaggcgtgagccwccacgcccagccagctgaagaaatttctaagcagcaaagcattcaagaggtgacttgggtactgctaaagtcgttcagttttaaagggggaacagagcattaaacttcagaaaatttgcagcctgactacgatagaaaagaaaaacccattttctggggagaagttcaagccagctgcagaaatttgcataagtagcaaggagcctgatgataatcctcaagaccatggggaaaatgtcaccaggccatgtctgagacttttatagcagcccctcccatcacaggcccggaggcccaggaggaaaaagtggttttgtgggcaaggcccagggtccccatgctatgtgcagcctagg

SEQ ID NO: 9854 - DNA, 13316 bp, Homo sapiens
tttttatgcattgtttgaatttttatttatttgtttttatttattttggggcggagtctcactctgcctcacccaggctggagtacagtggcgtgatctcggctcactgagcctctgcctcctgggttcaagcgattttcctgtctcagcctccygagtagctgcgactacaggtgtgtgccaccacgcctgggcaattttgtatttttagtagagacagggtttcaccatgttggctaggcttgtcttgaacccctgacctcaggtgatctgcccaccttggcctcccaaagtgctaggattacatgcgtgggccaccgcacccagcctagtttgaatttttagaaagactgttttccttcaccaagaattcttttttgaaaaaatgaaccactgaggacatgttgacatgttactcacatgttgttgacatgttgcccacagtgctccktatgccaggcaggtctgttttttttcttttttctttttttgagacagggtcttgtctgttgcccargctggagtgcagtagcatgaacatggctcactayagcctcaacctcctcctcctgggctcaactgatcctctggcttcagtctcccaaatagctggaaccacaggtgcacactcccatgcctggctaattttgttgttgttgttgtttgttgttgttgttgttgttgttttgagatggagtttttctcttatccccaggctggaatgcaatggtacaatctcggctcactgcaacctctgcctcctgagttcaagtgattctcctgcctcagcctcccaagtagctggcattacaggtgcccgccaccatatccagctaattttttgtatttttggtagagatgggatttcaccatgttggtcaggcttgttttgaattcctgacctcaggtgctccacctgcctcagcctcccaaagtgctaggattacaggcgtgagccaccgcaccctggtctgcccggctaatttttaaaattttggtagaaacggggtcttaccatgttgaccagactggtcttaaactcctgggctcagacaatcttcctgcctcagtctcccagagtgctgggacttacagatgtgagccaccatgcccagccaaggcctgtgtttttgtgccacatgcccccacctgctctccattactggccatgacctattgggtcagggataggcacttgacctggagacgatcaaatgattggtcagaagtccacatggtagcctggcataagaggccctgtttgatagtggtgatgggtgcacaatattgtgaatgtactacatgccattgaaatgttcattttaaaactgttacaggctgggcatggtggtgcatacctgtaatcccagcactttgggatgccacggtggaaggattgcttgaggtcaggaatttgagaccagcctaggcaacagagtgagacccccatctctacaaaaataatactactactaataamtttaaaaataaaaaatttacaatggcaaatttgaagttatgtgtattttaccatagtttttaaaaattaaaagtacaagaaaaaattgccaaaaaaatacaggtacccagtaaatgtttgtagcagatataagccacaaattacaagacaaaaatattaagattctaatggccagtctgggcaatagagtgagacctggtctctacaaaaaaagttttttaaaaaattagccctgtgtggtggcacgtgcctgtggtcccagctacttgggaggctgaggtgggagaatcacttgagcctgaaaggtgggggctccagtgamccgtgatcatgccacccactgcactccagcctgggcaacagaggcagaccctgcctcaaaaaaaaaaaaaaaaaaaagaagaagaagtggaagaggaagaacaagaggaggagaaggaggaaaagaagaggaagaagaagaggaagaaggataagaagaggaagaggaagaggagaaggaagaaaagaagaaggagaagaaaaagaagaaggagaaggaggaggagaaggagaagaagaagaggaagaagaagaagagagaagagaaggaagaaggaggaagatgaaagaagataatcccaatagattcacaggcaaattgtaggaacaaacaattcacaagaggacatgtaaattataattttgaaatctttacrtataattttatgccaactaaattaacaaacatggaaaagaaagaaggaagaaaggacagaggaagggaggaaagaggaaaggagggaaggaagaagtaatgaaaaagaggagaagttggcaggaatggagagagggaaaaaagaaaggaaggagggaagggaagaaaggaagggatgagggaagagtagaggtgggaatgaagcaagaggaggaaggaaagaatggagggaaagaaggagggggaaggaagaaagccagtagtcatggtgaaatcgagattaaacttactccatttcttctgcctgcatttcctcatctgggaataaaaataattctacctgccggtgggagaaattgctattgcctacccaacatcagggtttcccttgtaccttgctggtggcagtggccactgagatgcaggtgaaggttgttggggcttcagggaaaaccttcttctgccccttgtctcttcctcacaccccctcgctagactagaggcagggtggctggccctctggctggcatctcaggtcatgatgcaaattgaaagacggaaactttggaccgaatctggccagcataagacaggaacagcctggaaaccgaggaccaagagatctcccgcagcctcggactgctcacctccagacaccacgtatgaaggaaagaaatacacctcttagatccaagccactgtgatttctggtctctgttacttgcagttttgtgcaattctcaactgataaactttctcttaagtgtgtgatgacaatgaaattagatgatgtttataaaatatgtcaatgtgccattgcatcaaaagtcctcatggtagtactgtctctcacctctgagcaaagccatcgaacaaatttttacaattcaccataatcacaaagcatttactcaggaaatgttttaacgtatgtacaggctgggggcggtggctcacacctgtaatcccagcactttgggaggcccaggagggtggatcacctgaggtcaggagtttgggaccagcctggggaacacggtgaaacctcatctctactaaaaatacaaaaaattagctggatatggtagcacatgcctgtagtcccaactactcgggaggctgaggcaggagaattgcttgaacccaggaggcggaggttgcagtgagctgagatcatgccactgcactccagcctaggtgacagagtgaaactccgtctccaaaaaattagctgggtgtggtagcgggtgtagtcccagctacttgggaggctgaggcaggagaatctcttgaacctgggaggcggaggttacagtgagctgagattgtgccattgcactccatcctgggcgacaacagcgaaactccatctcaaaaaawaaaaaaataataaaaacaaaaataaagtatctaaagagttaccaaatacatatatgtctccaaaaggcatttattgctaatattctgctaatattagaacacactgggatcaaataaaaaattacccmaagaggggaggaaaaagtcacttgttttctaaactaggttgattttatttcatgggtaaacttgagtggtgttgggaaattgtgacctcagtgtgctactttcctactggaaaataagacctcaaaacctctccaaactagtcacttcatcttacttatgagaggcacgacaaaatggatacttttcaccaaaattctcctgtgttctacattgcaaaatcaatatattttagaggaagaagaagctttcaaacttcagttcttccaaaggcatagttggtgcagggggtggggtgagggtggaaaaaaagggctggtggtgaggtgtggctccgaggagcaagtcagccctcgccccgccaccggaacagcgttcagtgcccgtcacttgtaacactggtcttcccaatgcatagcccttgaagataatcagggccgggtgggtccccggtgtcaggggaatttgccaagagggggaagaaacaaacgtacaggtttacctgcaacagagaaagtcctcattcccaccctattaggatacagagttttcaacaacaggattcctttggtggagcaagttgcagggcacagggctgttggcaggagattatcaggattgtagcgttcacatctgtaccttggaaaggggcttactctccaagtcattaaaaggacactcaaacacaaactcaaagttagttagcatatatatgaaatgtattttcttggtagtctctagagtttcagccaaaagctacatgaagaaagaagagaacaacatgtttgagagatggagatgaggaacattattgagagatagagcttgcaatcttaactcagcaatggaatgctggaaaggctgaattgacatactctgttctttggttccgtatgtcttttttttttttttttttttttgagacagagtcttactctgttgcccaggctggagtgccgtggtgtgatcttggctcactgcaacctctgcctcccgggttcaagcgattcttctgcctcagcctcctgagtacctgggattacaggcacccaccaccatgcatggctaatttttttgtatttttagtagagacggggtttcaccatcttggtcaggctggtcttgaactcctgaccttgtgatccacccacctcagcctcccaaagtgctgggattacaggcgtgagccaccgcacccggctggtttcctgtgtcattctaaatcctttctaacccagtaaraggatggatggatggatggatggatggatggatggatggatggcagatggatgatcagttagaccaactcaggaaaatagggaataacatggaaaagaatgcttcgcgtccctcactataagttcctaaaaagctacaatgggaaagtaatccatgacctaccttcacaaaacctggtgagaaactgatagattggggattttccctgaactcagatggagttcaagcttcattaaaacaaattctaaaggactgattgacattttattctattgtattttgttatactgattgttttttaaccagaaataattgggccacagtagaycttttttaaactgagttttgtgtgtgatgtgtgatgtaatttgttttgcaatatccaaggaaattttcatgctccatttgccttcggccacaaactaacagtcaatgccccaccccaccctctacagcagcaggaaaaaataagtccagatcaatgttgcccacaaatttctcacctctgtatattccktggacagycttccaatttcaggctcttttgctcccctcaccgtggccaagtcttagacrgaaattggagcacagatggcttctcaggggtggccagamttgtgttcccaagacgcctggctccctggtcttatcctctcctttcaggtcgggtctcagatcaggattctttaagggccaacttcgcattctgggcaagtgaatgacacctagggcacaccctcttctcagcagcctgcacttgatctccttttaaaggggaaattacatytcttgttaagactgaaagaggctgccgaactttggaggaaattactatgttgttctcaggacagctggaagaatttctgaaagagaagacctaggcaaggggcagagggaagctttgcccttgcaaacatttgctcacagccattgcttagaattaaggagcaggttcatgcccatcctgtcagccatatcctgcagggtggcaggcatgctgtagcccctggtataggccatggtgcctgccaccctgaagctgcctgtgctgtacaaggagcagcctttgctatgccaggagtcactgagtggccaggccatgagcctgtcttgggtcaactctgtgggyctcaatgtccctgcttctgttcgttattcccatacagacatyaatgtgcctgacttccctgattactgttgcattgagatttttgatgggacaaagtcttcaaaagaggatggcgaggctaggaaagggttctcctatttggtaactgcaacaactgctgtgggtgtcacatatgctgccaagaatgtcatctcccagtttgtttccagcatcagtgcttctgctgatgagtcggccgtgtcgaaaattgcaatcaagttatttgatattccagaaggcaagaacatggctttcaaatggagaggcaaatccctgtttgtatgccacagaaccaagaaggaaattgaccaagaacctgcagttgaagagtcccagctgagggcccatagcatgatttaagggccaggcacagtggctcatgcctgtaattccagcactttggaaggccgaggtgggcagatcacttgaggtcaggagctcaagaccagcctggccaacatggcgaaaccccatctctactaaaaatacaaaattagccaggcgtggtggcatgtgcctgtaatcccagctactcgggaggctgaggcaggaaaatcacttgaacctgggaggcagaggttgcagtgagccgagattgcaccattgcactccagcctgggcaacacagtgagaatctgtctcaaaaaaaaaaaaaaaaaagaagaagaagaagaagtaaaggatgggccgggagtggtggctcacacctgtaatccaagcactttgggaggccaaggcgggtgaatcacttgaggtcaggagttcaagaccagcctggcaaacatggtgaaactccgtctctactaaaaatacaaaaattagtcaggcgtggtggtccatgcctgtaatcccagctactcgggagaatgaggcaggagaagtgcttgaacctgggaggcggaggttgcagtgagccaagatcgcgccactgcacactccagcctgggagagagagtgagactctgtytgaaaaaaaaaaaaaaagataaaaaaggagtaaagaatgagtgcaatgcctatcagggtaacccattcgagtttctttactaggcgtttgcattcatcctgttgtacacctattgcaaatgaagattttggtggtgattactgcccttgctgggggtcacacagatgcrtctgggaggatctggaaggggcctgcmcctcttgagcttggagctccctcatatgrgttcaccagtgaggacacagtcattgttggttagagactgggactcaagttgtaggctcctttcagtctttgcgtcactgtagaagagttatttgagagcaagccttctgaacttcaagttgcttgatttgaaatatttaagaagtgataatgtatttgcaaacattactgtgaagtaaattgaatttaatgttgaatacgttcaagcattcacttaataaaacaactgttamacactgttacactgtcatacacttgaaaggtgcaatgtcttttaggtagttstaattttttactttaaaaaaattttttgtttttatttttttgagatggtgtctcgctctgtctcccaggctgaagtgcagtggcgtgatctcggcttactgcaacctccgcctcccgggttcaagtgattctcctgcctcagcctcctgagtagctgggattacaggcatacaccaccatgcctggctaattttcatacgttcagtagatgaggagtttcaccagttggccaggctggtcccaaaatcctggcctcaagcaattcacccacctcgacctcccaaagtgctgggattacaggcgtgagccaccatgcctggcctaattctaatttaaaactacacagtggtatataaaaattaaaaaaaaaatagacttaaggatcaacaggctggtgatccatttaagcacagggttctttttagatagttgttgagaaggacatttgtgagctgagaacctgaaaatcgtccagtggccatggcagcatgggattggtagatttcttatccctccatttgcatgctgtcttagtctattctcccagttcaaccatcactgacagtatctcctccacacccagggctttacaaccaccttttctacagtccagagaggtggagatcattatttccattcggcaatgaggggaacaactccatttctttcctgagggcactcatgataaagcatcaaagttgggactcaaacatgtacaccttctgaccttagctatcattcttttgytcaatctcattaagtgaatattgagcatctaatatgtgccttccactgtgctggaaaagtcatgatactgacatggaaggtgacacagaagcttccttttaggtttgagcaatgccgcttccatgagcaccaatcagctttaccacacacagggcacgtaggcacttaaaaaacagggtctcatccaaagcatattttgaatttaatcagctcttttagaactttactaacaatgaaaatttagaactggccagatgcggtggctcacacctgtaatcccagcactttgggaggccaaggcgggcggatcacttgaggccaggatttcgagacaccagcctggccaacacagtgaaaccacgtctctactagaagtacaaaaattagccatgcatggtggcggttgcctgtaatcccagctactcaggaggctgaggctggagattgcttgaacctgggaggccggaggtcacagcgagctaagattgcaccactaaactccagcaagtccctgagacmgagtgaggccctgtctcaaaaaaaaaaaaaaaagaagaagaaagaaaaagaaaatttaaaattaaataagatactattattttgtaaattttaaaagcactaaaaaaaaaaaaagataattatacttaattctatcagtatagttaccatgaagataataacctacatggataaagtccattcagacaaaacagtcagtggggccgggtgctcatgcctgtaaccccagcactttgagaggctgaggcgggaggatagcttgagcccaggaattcaagaccagcccgggcaacacagtgagacaccccctacccacggcaactctacaaaaaaactaaaaaatattagctgggcatggtggtacacacctgtagtcccagctcgtcaggaggctgaggtgggaggaacatttgagcttgggaggctgaggctgcagtgagctgtgatctcrccgctgcactccagcctgggcaagagtgagaccctacctctctmtatatatatgcaaacatatatatcttgtttatcacatatatcatatatgatatatatcttgtgtatcayatatatawcttatcggactcttaggagtttgttagtgcaggcacttaagaaatgactaatgactttggtgcccacagagccagggagtaacgggccagacctcttggtggttttcctcccagcacaccattttctgaacttgtcgaagcctccaaatctctttctccagttactccagcataacgtgcattgacagtaaacaaagtcctcgatgatgtcatgttgccacacttcatttcacaggatttagcawccagagagccacaccgggggcggccctccctccaaacagagaacattatctcttcttcctcagtgaaaattcatgagaaagttcctaagcttgtaatgcttagccctagacaacggaaaaaggtgtttgaggaaggaggaaatgaggaaatacaatatgcatgatccttctctgggattagtttgtgtagctctattgttcagctttggcctataattgtcagtagtaaatggtatggaataatttttttttttttccaagatggagtcttgctctgtcacccaggctagagtgaggtgacttgatctcggctcactgcaacctccacctcctgggttcaagcaattctcctgcatcagcctcccaagtagctaggattacaggcacctgccaccatgcccagataattttttatttttaatagagacggggtttcaacatattggtcaggctggtcttggattcccaacctcaggtattctacccgcctcagcctcccaaagtgctgggattacaggcgtgagtcactgtgcccagactggtatggaataattttgagtaaaaacatcttttttttttttgagatggagttttgctcttttgcccaggctggagtgaagtggtgtgatctcggctcactgcaacctcagccccccggggttcaagcgattctcctgcctcagcctcccgagtagctgggattacaggcacctgccaccaagcccagctaatttttgtatttttagtagagacagagtttcaccatgtttgccaggctggtctcaaactcctgaccttgggtgatccacccgcctcggcctcccaaaatgctaagattacaggcgtgagtcactgtgcctggccgaataaagacatcttaaggaaaaagtgaatgactcagatgtttattttctcaaatacaatatttaaaatattgcaagaagacatctgtttagcattctcccctcatttgtcaattaytttattatttgagaattaataccccacatgaagacaatatcacttgccaaagtccttcctctgacgtggttaagtcgtatcaaatccacaggctgacgtccaaataatacacagtttcatgcttcaggtgagccaagaacaaccttcccattgagcgccttgcaggggctgatatcaaagacaagactgaacttccttcattggcatggtgaccaccgtgggaggtgcagccctcagcctrctcctcggctgtgccatccaggatgtgtttaaaggagaayggagaaaacttgtaaccatccccgacatagaacttgttctggaactcaaccctgttgttgaggggaggccgtggggtaagaaatgggagattgaaacacatcagttagaggctggaaggtggagggaaggaggaagcagagcgttcgtaaaatcaagcacaaagtcagaagggttggccacggcrggcacccaggctgatggctgccatgagaatcctgaggatttttttttttttttttttttgagacagagtcttgctccatcacccaggctggagtgcagtgtcgtgatcttggctcactataacctccgcctctcaggttcaagagagattctcctgtctcagcctcctgagtagctgggactataggcatataccaccatgcctagctaatttatatgtgtgtgtgtgtgtgtgtgtgtgtgtgtgtgtgtgtgtgtgtataatatatcatatatattattatatatawtattatatatacatcaatattaatatattaatatataatatattatatatattatataatatattatatatattayataatatattatattatatagaatatattatataatatatattatattatatagaatatatattatattatatattctatataataattatattmtaaatatatttwtatttatttatatttatatttatatttataatatatatattataatatatattatattatatatatatttatatatatataaaaataaatatattatatatatatattttttgagacagagttttgctcttgtggtccaggctggagtgcaatagtgcgatctcagctcactgcaacctctgcctcccaggctcaagcaattctcctgcctcagccttccgagtagctgggattacagatgcccaccaccatgcccagctaatttttgtatttttagtaaacaccaggttttgctatgttggccaggctggtctcgaactcctgacctcaggtgatccacacacctcagcctcccaaagtgctgggattacaggtgtaagccactgcatccaggccatgaatctgaggattttttaagcccttctctcatctgtctcttaccaccttccccttcccctccccttcatttcctccaggcctctctgcttgtgggctcatggycacagcataacaactcttccttcatggaaggagcttccccacccccatgacaagccaagacaccctcactgtgcagcactctctcatgtcattttccatttccagctaattctaaaatgtgggactcacatattatagaacgcaaagacccttgacctgtatttttgtaactcacataactgataccatgtcggatgatttatgttttattttatttatttatttatttatttatttatttatttatttatttatttattttgagacggagtctcgctctgttgcccaggctggagtgcagtggctccatctcagctcactgcaagctccacctcccgggttccagccattctcctgcctcagccccttgagtagctgggattacaggcatgcgccaccaccccagctaattttgtattttcagtagagacggggtttctccacgtcgatcaggtcacaaactcctgacctcagctgatccgcccgccttggcctcccaaagtgctgggattacaggcatgagccaccgtgcccagcctcatttatgttttattaatttacagagttcagttcctctcctcaatgacatggaggggaatgacgtcatcatggaggcaggggatgctgtggctctcctcactcagtacatgaagtgcaaaggcttctttatgaatagtggccatagagggaggaagaaaacatcagggcaagctgggtacagtctctgcagctgaagggcatgcactgcacactcagaattcttggttgaaatgtaacttggaagacaaccagaggcctaaacatgtttccatattcatcaacctaacgacggctgattgtcactggatacatctgtgcatgtccagggctcccggtgagcgtctccctcctggtggtaccctccttctctttccacttttgagattttcataccttgttggtataactcctctactcagcaacaagagccaaacatcccagattcactgggcgcagtggctcatgcctgtaatcccagcactttgggaggctgaggcagatgaatcacttgaggccaggagtttgagaccagcctggccaacataggggaaccccatctctactaaaaatacaaaaattagtcaggtgtgacggtgcatgcctgtaatcccagcacttcaggaggctgaggcgggtgaatcacttgaggccaagagttcgagaccagcctagcaaacatggggaaaccccgtctctgccaaaa

SEQ ID NO: 9855 - DNA, 13237 bp, Homo sapiens
tatgtaatgaagcttccataaaaaccctgggttcagcgagctatctgatagctaaacacatggaggttcttggaggatggagccctggggaaggcatggaatttctgtgcttctttccctatgtctcaccttatgcatcgtttcatctgtatccttttgtaatattttttatagtaaaccagtaaacgtgtttccctgagtcctgtgagcagctctagtgaattaaacccaaagaggggccrtagcaacctcaacatgaagctggtctgttagaagttctggagccccggacttaacgactagtgtctgaggtgggagtggggtggggtgcagtcttggatactgagcacttaccctgtggaatctgatgctttctccaggtagatagtgttggaattggattggaaaacacccagctggtgtctgctgtagaactgattgcttgcttggtgtgtggggagaaaccccgacccatttggtcacagaagtctgctgtgttkattgttgtggtgtgagcagacgcaaaacatcttgagtgcatttttccactcacagaaacagtgcttaaagactggcaatatgtgtgcatcatgaactgtagcccagtgggatccatatattttgatttcattctcagaaaagggaaggggggaaaaaggttttgttttgtcttgctctgtcacccagkctggaatgcagtgaaatkctttttatggaggcaaaaatagcctagcatggctgttcatacagcaaaagaagataaaatagcaatgtagaacttaatccatttatttgcaatgaaagataaaatatataaaatattttttaaatctcactcagataacacctttacagtaaataaccttaattatatgttttaggctctctccataatgaaatagtaatgcagactatatgccatgtcactagacttggaatgccttggacttgcttatatttattacacatataatgggctccctttgtcttaaggtctacatctaatggctaaaccatttccaaatatctgtttcatttgccattcagtgtttatttttagactacaggatgcttcgaaggcaaatttctaatttatattaggtgaccttgcaaaatctacataatatgttattatttaaataatttctgggctgagcacagtgccttattcctgtaatcccagcactttgggaggctgagatgggaggatcacttaagcccaggaatttgagaccagcctgggcaacatagtgagattctgtctctacaaaaaatttaaaaattagctgggtgtgatggtgcacacctctggcccagctacatgggaggctaaagtggaaggattgcttcagcctgagaggttgaggttacagtgagccatgattgtgccactgcattctggcctgggcagcagagcaagacaaaccaaaacaaaacccttttcccccgttccctttcctgaaagtgaaatcaaaacatagaaaaaaattcctcaaatatgacatgaaggatttaaaaatcctaatgaagttttctattttcaaattgcagattgttctcatcctttctgctttacctaagaggctgctaaataaaacaacagaaaggatttttaaaagatgttaacttctaaggacaaagagaataggaaatgagacaacagtggatgagagatgtcaacccattatctgaaggccaaaacagagaaatgataaatgaattcatagatcagaaaaagttacatgctaaatgtctgcaagtagttataccaaagagagacaaacccacttgacagagccttgtaagatgcaaaatttttgcaagcagaagattccagggaaggtgggaaggtgtagggttagagatgtgagattcattaaagtctgtgttcagagttgttgggtgtccaggatctctatcccactctatgaagccagataactctttccatcccacagaagatggaaattttattttctggataaattgaaccaaagaaggcccaaactcagagaaagtaggcacagtgtcaaataaggaaaaaattatgtgaaagtctgtatatttactccaggtgtgtcatccctcttcccctctcttgttctctttaaatcagtatctaggtttataacctacctctcccccaccacaccctgcacacacacagtcaaagctcatagagcattctctgaggaaactatgtggtaccagagaaaagaactgcaactgctgacatttgggcatttcccaaagaaaagcccagattactatttactacagtgaagactacctggtgacaaattatccatgcacaatttgctttttagtacctcattaaaaaatttttttttaaattttctcagagacctttgttctgaagtacctcacttttaattgacagccaaggataattagacaaggaaagttttctaaatgaaagagaatgctttcagcatactttcttccccccagattttgtttttactacccatggccgaygacggcttggaatgtaagcctggagagaattcattccaatgctgggattataaatatctgggaggaagaagtgtgtcctgacagtggtatcctcactaatgtccaaaaaacatcttgctttgaaagctagacatgtcatttgtatcccgaacttctacttctttttaaattgaatttcattttagattcaaggagtacatgtgcaggtgtgttacatgggtatgttgtgtaacgctgaggtttgggcttctagtgaacccgtcacccacatagtgaatgtagtacccaacaggtaggttttcaaccctcaatccctcccaccctccccacttttggattccccagtgtctgttattcccatctttatgtctttgtgtacccattgtttagctcccacttatataagtgagaacatgcagtatttgattttctggttctaagatatttcacctagaataacagcccccagctccatccatgttgtgagggacataatttcattcttttttatggctgcatagtattccgtggtatacatataccacattttctttatccaatcaactattgatgaacacttacattgattctgtgactttcctgttgtgaatagtgcttccataaacatatgagtgtagatgttttctggttttttttttggagacagggtcttgttttgccacccaggctggatcataactcactgcagcctccaactcagctcagtcaatcctcccatctccgcctcctgtgtagctgccactacaggggcatgccatcatgcatggctactttttgtatttttttgtagagatggcattttgccatgttgtccaggctggtctggagctcctgggctcaagcgatctacctggcttgggctcccaaaattctgggattacaggtgtaagtcactgtccccagcacaggtgtctttttgataaaatgatttcttttcctttgggtagatacctaatagtgggattgctgggttgaatgggtgttctatttttagttctttgagaaatctccatactgctttccataggggttgaactattttacattcccaccarcagtgtacaaacgacaaatttctacttctgcatgaggctgtgtgggtcctcaaagagaatctcaaaacttagaaagcatagtgctgagccacccagctcttttctatcaagtttcttagcaatgcagtatataaatactatccattttccaagttgattttatagtgccgtgttctatcttcagaaatgataaggactccacgttccaccagttcccagggctgcaaccccagatccttggggatgttgccatgtgatagcatttctccagctctgcaggaaagcagtagcacatctccagggctaaggattcccacagtgccctactcccctccttgccccccaggaaagtgaggagcrtgggcagatcgctgagggttttctgatcaaaagcagtcactgtctctcatgtagcaaccctcagatcgtttcgttaccggacaggggtcccgatccagacccaagagattgttcttggatctcatgcaagaaataatttggggcaagttcatagagtcaagtgaaagcaagtttattagagaagtaaagaagcaaaagaatggctactccataggcacagcagtggcctgggcgrcttgactaaggatacttacagttttttattgaatgtaagctaaacaaggggtggattattcatgaggtttctgggaaaggggtccaaagttaccggaactgaggattcctccccctttttagaccacatagggtcacttcttattgttgccatggcatctgtaagtggacacggcgctggtgggcgtgtcttttagcatgctaatgcattataattggcgtataatgagcagtaaggacgaccagaggtcacttattatgccatcttgattctggtgggatttggctggcttctttactgaaacctgttttatcagcaaggtctttgtgacccgtatcttgtgccggcctcctatctcatcctgtgacttagaatgcctgtcttcctgggaatgcagtccagtaggtctcggccttattttactcagtccctagtcaagatggagttgctgtggttccagcgcctctgacagtttgtcttctctastttattttttgtagggggtaaggggtgtctcattttgctgcccaagctagccttgaactcctaggctcaaatgagcctccctccgcagcctctccaagtgttgggattacaggcatgagccaccacacctggcctgtcttatctactttaaagcagttttcttgtagattgaccctctgaattcagggtctattcaagtgagggcatcttcttttcgggttgtttgtttttgttttttgcatggtaagaagcgtgggataggccgggtgtggtggttcatgcttgtaagccccaacactttgggaggccagtgggtggattgcttgagttcaggagttcgagactagcctgggcaacatggcgaaaccccgtctgtacaatacaaaatttagccagatgtggtggcttgcgcctgtagtccctctagtctcagctactcaggaggctgaggtgagaggatcgcctgaggccaggagattggggctgcagtgagccaggatcgcgccactgaactccagcttaggcggccgagtgagaccctaagtcaaaaaaaaaaaaaagagagaaaagaaaagaagcagggctgactgattaggacagcatttcttttgccgccagctgaactgcggcgtctagagttcccggccataattgcaagaatttatcgaaaagctttacatgttttcttggtttggttttgttttgagacagagcctcaccctttcgcccaccctggrgtgcagtgtgcgatcatagctcactgcagcatcgacctcccgggttcaagcgatcctcgcttcattctcctgaattgctgggaccacaggcgcgcgccatcgcgcccgggtattttttcgtttttgtagaaatggagtcttgccatattgcccaggctggtctcgatctcctgggctcaagcgatcctcccgcctcggcctcccaaagtgctgggatacaggagtgagccaccgcgcccagtcgcagtacactaaaagtatttattcggtccgcgtcccccgcctgcgggtgcagggatggcggctccaggctggaggcggctgggggcccggccagtgcgccaggagccgcaggaacgctagtgagccgcgcgctgggccggcagcwgggggttattttagtgcgcggggagggggcggcccgcggcggagcgtagggttgagcggcttcccccgcactggggtgagagcccagaacaggcggtagagccaccccaccacccccaactccattccccgcgctcgctgcggctggacgtgaaaagccggtctcacgctctggggagttagtcgccttccactgggaccctcagacgagtgagcgaacatgaagtccggtcctggcatccaagccgccatcgacctcacagcgggggccgcaggggggacagcgtgtgtactgactgggcagcccttcgacacaataaaagtgaagatgcagacgttccctgacctgtacaagggcctcaccgactgcttcctgaagacatacgcycaagtgggtctccggggcttctacaagggcaccggcccggcacttatggcctacgtcgccgaaaactcggtcctcttcatgtgctacgggttctgccagcagtttgtcaggaaagtggctggaatggacaagcaggcaaagctgagtgatctccagactgcagccgcggggtccttcgcctctgcatttgctgcactggctctctgccccactgagcttgtgaagtgccggctacagaccatgtatgaaatggagatgtcagggaagatagyaaaaagccataatacaatttggtctgtcgtgaagkgtatccttaaaaaggatggccccttgggcttctaccatggactctcgagtactctacttcaagaagkaccgggttatttctttttctttggtggctatgaactgagccgatcgttttttgcgtcagggagatcaaaagatgaactaggccctgtccatttgatgttaagtggtggagttgctggaatttgcctgtggcttrtcgtgttcccagtggattgtattaaatccagaattcaagttctttccatgtatgggaaacaggcaggatttattggtaccctyttaagtgttgtgagaaatgaaggaatagtagccttatattctggactgaaagctactatgattcgagcaatccctgccaatggggcactgtttgtggcctacgaatacagcaggaagatgatgatgaaacagttggaagcatactgaagtgtcttggtgaacctggatccgagtccatgagtttgaggactacagttcatcacagggttcagcagagtacaagaccactgtctaattttgacttcatgggaattttggttttatcttcccttcttctaccctaaatcttaactttatggaagggcctctattttacatcatataatttctgcccataattgtattgaaataggaaagttgctgctcttgcacttgctggaatgtacagggtgggctggttggccctatgtacctaatctgaaaaactaaatatcgttctgtcagggcctttgcataaagccatttgtgtgtacatgcagtttggatgattctatgtcgtgagtgaaacaatttagttctatatataatctcaaatatcagccccccaaacccagaattgaccatattttgtgaagataggtatgaatgattacttaggatcactctctctttttttctttttttttggagacagmgtctcactctgtcgcccaggctggagtgctgtggcatgatcttggctcactgcaacctctgcctgcctggttcaagcgattctcctgcctcagcctcccgagttgctgggattacaggtgcccgccaccatgcccagctaatttttgtatttttagtagggatggggtttcaccatgttagccaggctggtctcgaactcctgacctcaggtgatccacccagctcagcctcccaaagtgatgggattataggcatgagacaccgcacccggccaggatctcttttaaagtctgcttaacatgcgcactacattaggcggttcaagttttgaaacatcttcatgtggtgcttgataccaaaatactcytctctctctctctctctcatatatatatatatatgagaaaaagtatatatatatatatactttttttttttgagatgcagtctcactcttgttgcccaggctggagtgcagtggcaygatcttggctcactgcaacctccscctcctgggttcaagtgattcttctacctcagcctcccaagtagctgggactacaggtgcacgccaccacacccggctaacttttgtgtttttagtagagatggggctttgccatgttggccaggctcgtcatgaactcctaacctcaggtgatccacccgcctaggcctcccaaagttctgggatcacaggtgtgagccgctgcgcctggcctcatctatatttttaagaggagaaggtacctgcataccagtgtggctttgacattcttgagttaaaagtttcagagtaagcattgtggattttcccaagaaacaatacccttaatatagtgttatccattttcaaagtgggattatattctgcactctgcctatatggttagggatgatctagagtatcatcaggccttggggaatccacacagccttcctgcgccagcttccgttctccccctcaaacgagctgggctttagttcgaggaaggagctgtgcacctctgctttgatgaagacccatgtggctgataacagttcttagcttccagtctctgggtcctggcctgggtaggactcaagggtgttctatcggcccatttagaggttgttgattcattttgggtcactcactgtcctttctgcctccatcagccagaaaccttcctggggaacagaaagtgacaaagctaagagaagcttttgttccctatttgctaataatacttgtgggtaaaagtcatctactctcagatagaactagacagaacttagtgcttttgctccacaatgagtcatgttagggacaaccctttcttgaagtttaccttggggtccataataccttcccatgcctttacagtgctagagtcttctaaatttggtactgttcatcagtaaattttaatgataactacgtatggggtgtgactaaggaatgaaacagaagaaaagtaattttattgaactatataccatatgtatgtatatgtacactgtcaaaacccctccaaaacaaagaamaacccccaaccccaaaacgtagttcatttatctgatccccacagacttggagataagcaactgttctttggccatgtcattcttgtcaccactaaagtaagccccatcattctgtgttgctccaagaccaccagcagggtctctttcagtatcargttttcttaagcagcctctaaagctgaaaagaagcaggctaccagtcttaataatagtctgtaccatgtgggtttattatttgacagaatgtaattcctgtgggaaactttgtttccttaagctttttgctatctatgaaatctctgtggtaactctagccttagtgtcagargcaagatggtcagggaaatgagatactgaccagtaagggttgctgcggacatttaggggaggggaggctcagtgtcaggcctggtgtgccccagagctatggctgatcttccatttatttacttttactttaaaagaaaatcatgtttatactttaaagttatttatagatttaagttatatattccatacttaaatggtcagtagctatggagtggtgcttcatcggagcaggcctgtattaaatataaaacgggactggcgtttaacaggaagtggatcatttcagagtccaccgtcccgctgcctggcacccatgaggtagtctaagttagctttgttgtcagcataccttcttacgtgtcattcattaaagatttaactcaataccttcaaaaaaatagtatgaggcaagtaaggatagtgggagtgaggaatagaaatctaagtcaggagaatttttttcctgtcctatttgcttaattcagtgttcaatatttgggtacaacttgtatcatttcagatctctaagcaaaaatatagtaatttgaaatactgtgtttaaagacatttgagggttctatcgccaaattatttatctacataatacttatttaactcacaccatttacaatgtattgtattgaactgtggctattcagacactaatggtatctggtttctgacttcaaggatctgacagtctagatgtttgttytacagttagaagagtgatattttagaataaaatttagaagaaaaaggtggaatccaaattttatattgtgtgtgtgtaatcagtgatggaatctctgaatttaaygaacagtccccttctctttgtttttgtttgtttgtttgttttttgagatggagtctcgctctgtcgcccagagtgcagtggcacgatctcrgctcactgcaacctctacctcctgggctcaagcaattctcctgccttagcctccctagtagctgggattacaggcctgtgccaccgcacctggctaatttttgtatttttagtagagatggsggtttcaccatgttggccaggctggtctcgaactcctgacctcaagtgattcacccacctcggcctcccaaagtgctgggattgtccccttctcttaattgtgtttttgtattgtggcttttygtattctttaaattagtgccatggtatttgtttctaagatttaaattgatcaaatcatttttctgatgcctagccttattttaaaattttcttcacttccacataacataatttgccccttaattttgaaaaatcttttctgtagtttattataccttttggtctattgtcaaggccaaagggtctgcatcttgcattgctgaaagacatcgtagttagaaattctttctgtgtcctagcattcactggatgctaagctgtagtagttaagtatatgtgatatctcagaaggatcatatctggcaatggagtatcaaagctgctcattttcttcatgatcttcttgctgaactcagaagaaatgtagattctctttcttctggctcagacctctaaggagggtgataattatttccaggaagttgttgtgtgactgaaactactggagatttttgctcaagaccagaaagtatccctctgtccagggcctgcacttccaacttgagcagctccttaactttaaaatccctgttttcaaagtctataatyctctacgctctctgatctctctagattcatgtgaaataggccagacatctctgagattcatttattcatgtgaaataggccagaagtcttccctgagattcattttagaaagcaaattatttcagtgttgaaactgaaaggagttagttagcttgccttaggtagagagcaaggsargggtccctggagagcccccagcccatgggtcagtgtctcatccccacataacataaaaaggagcctgggaaaaaaattcaagctgcaggcacygataaggaactagcacagggtgttgtgcctggagacakgcccacagctgcacagatagaaaaacctccggcccatttggataaaaacttgcatagacctccggcccactcagataagggaacaaggcctggcatagaaataaaaacgtacataaacctccggcccactcagataagggaacaaggcctggcatagaaatgcctttgtcctttgtatagtcagcaggctcccaggaaaaagtttcttctccttttgtgggcaggggcacagtgggctctagtgggttccggtgggcacttttctttcttttttggactgtaagtctgggctctatgaatcatcacttcagcccctgattgttcccaacccaaggtcccgggcaaacctttctggttgatgtcaggtcaagctgagtcacatgttctccagacagcccagggactaagcacattccttcctcttcccagcycctgaaaaccctggaccccagcctcacacggggcaccctgtttaggcccgcctctctgctgacagagaactttcttgtttcgcttattaaactttcgctccaacctcacctttgtgtcttcttggaggtaggacaaagaactctgggtgttatctcagacaaggagagactgttacatcttggtgcattgctgagactacaacaaaactatcatcagggtctgtggcctgctttctgagctccactgtctacactgttcttggcttcctcctaatgccagcacttacatacagacttcttgttaatgatgtttaaaaggtggactgctatcttcctgtttccccaacctcttcaaggttggtagcatcaccagtagtgatgctctattccttacatgaggcttagtagatttttcaaaatcagttcaggctggctttagtctgcatgttgagaagaaaaaatatcacaagtgggtaagtagctttgtagataattgatgtctcttaacaatcatgcacattctgcatgtgaaaataatgtccccagaaagggcattattatttcttccactgggaagccagataattatgtatatagcgagtatttctactgcagcctgargaagtttcactgggtccttctcaacaacctggtctctcagcagacgtgaactagggcatctctctacatatcttctttaatcattgatttacaaacagatcttttgtgcatttagaagaagtgtgcttttctgactttggagaaatagtggactcacctctagccggtgctcagggtttctcatctaggttctccacgacgttgcccacaaaaaagccttcttcaactccttggtactggactcagatgctcatttagacaggcagaggcagctcaggaggttagttagtcttcccttgtgtctgcagcctgctgcggcaccatgactgtcttctggtgaatgcattatgggatttatttattattattattttttcagacggagtctcactttattgccaggctggagtgcattggcacgatcttggctcactgcaacctacgtctcccaggttcaagtgattctcctgcctcagcctcccaagtagctaggactacagccacgcaccaccacacccagctaatttttgtatttttagtagagacggggtttcaccatgttggccaggatggtctcgatatcttgaccgcgtgatcagcctgccttggcctcccaaagtgctgggattacaggcgtgagccactgcgcccagctgggatttatttttctactttctgcttctgtttctttgtttgcctcccctcttctctttgccatctggagtcaaagctgatccaagtcgataagaccctagctctatgtccaagcactagtgattctccaggttgattctgttctgtgcctgcagtagagctgggcaggaaggctcctaggttctgcgttttccatgctggagaaaagatctaaaggcctgggagaagttaaacatgtttggcaagaatacatcattggtgatttt

SEQ ID NO: 9856 - DNA, 404168 bp, Homo sapiens
  misc_feature (243911)..(244140): n is a, c, g, or t
  misc_feature (291407)..(291929): n is a, c, g, or t
  misc_feature (299179)..(299198): n is a, c, g, or t
  misc_feature (314389)..(314639): n is a, c, g, or t
ttgcatacacgtacaaagaattttgacttcacaacagtaagactttttttttttttttttttaaattccagagcttctctccccactgaggggcaaggtaacaaagtaaatccacagttaagctacctcatactgtaaggtgatattttactctagttatggaacttctttctttctgtcctaagagcagcagtccccaacctttttggcaccagggacctgtttggtggaaaataatttttccccagatggtgcaggcggtgaggaggatggttatgggatgaaactgttctacctcagatcatcaggcattagattctcataagaagcacgcaacccagatcccttgcatgcgcagttcacagtaaggtttgcaatcctatgagaatctaatgccaccgctgatctgacaggaggcagagctcaggtggtgatgttcaccggtccactgcacacctcctgctgtgtggcccagctcctaagggttggggacctctgccttataggacaggttagcaaagttaattgtacaactaacccacaaaagtaatttatatttgtctttcatcaaactaatgttgtgacaagtcaaattcactattttaaacgcttagatcagacaatatcaagttattccctctcgagaatggtcaagaataaaaacaaatgtagtttattttctctacctaatttcttttgcagatgaagttgttatagggagttgtagataaaaactttagtaaagcaaacatgatttaaacatgctgtgcaatccactatttatgaaataggctgggtgcagtggcttatgcctgtaattccagcactttggcaggctaaggcaggaggattgcttgcgcccaggaggtgggagaccagcctgggtaacacagtaagaacctgtctctactaaattaaaaaattagccatatgcctgtagtcctagtgacaagtttgtagtcgtagttacttgggagcataagatgggaagctcccttgagcctcagagttcaaggctgtggtgagctatgatcctgtcgctgcactccagtctgggtgacagggtgaatccctgtctcttaaaaaaataaaaaatgaaataagggggctcaaaaaccttacaccttgcctaaagaagtgagctgacaggtagaaatttggaaaaaactcacaaatataaaattcacaaggcaaagagggaaaaaagatcataaactatagggctttcaaaattctcagaaaaggaaattaaagttaataggtgtgtatggagactaagaatgggtaagatgagggaaaatagtaaagataaaatctagatataaaaaaaccaaattgctggaaaataaggtacaaaactagtttgaggccaggatttagtttcatctctatttcatccctcagccaataactaattgaattaaattctggaaatgatatacagtcatgttgatgctaacgtctcattaggtacaagcaaatgtgtttaattatataacttccttatttgagaagcaaagttaacttgacaaaattttgtttaattataygatttaattctttgcacatgtccgtattactaaacattatgggaagtctcggggattaagtggaagatgatttaattttttttaaagtttacaattatactgagaaaaaactgacttccttctcttcacaacagccatctcatatttatttatttatttatttatttatttatttatttatttatttttgagacaaagtcttgctctgtcgccaggctggagtgcagtggtgcaatctcagctcaccgcaacctccacctcctgagttcaagtgattgtcctgcctcagcctcccgagtagctgggactacaggcacccgccaacacgccctactaatttttgtatttttagtagagatagggtttcaccatactggccaggctggtctcgaactgctgaccttgtgatctgcctgcctcggtctccgaaagtgctgggattacaggtgtgagccaccccgcctggcccttcattttagttatcttaagttataagaaataaattattatccctatatgcaaatgtggttataaagacagagtattgattctgtggtttggtgctgcaatagcaatttgaaaattacattaccatttgttaccacacccccttgacacactaattccccaacttatttacaatagaatatggaaagtcaatagtgaaattttttaattcaaatagcaatagtattttacaaacctatcaagccttgtttatcactgtaatattctcaagaatgggaaaaacaaaactgctaccaattttcactactttatttctgagaaattaaaacttaatactaactcaaatggatgtaattaggtataytaaagtaccagttcaaaaaagaagaaaaaaaaccctattacttgcaaggcatggcaatgcacatcttctgcataatatttgacaaagcttatttcaagtttatataattttctattgctactgtcatgtaagacctctttggagaagcacccatttgtaccaggttcaatgacttcggaggcccaccatatatatacctcacctcgttattttgcataaggtgcagcttgtcttgaaccctgactggacattcctgtcagaaagacttcataatataactgtcttcatgctaaccttaaatttgtttaactatacaaattccaagaacactattatatgtgaagactcagtaaattttcagaaatgcctctgaagagaaaggaatagcacctctcacaagttgtttcacagaaaagaaacactcaagtgttgataaataaggagaattaaaaagaacagcaacaaaactgtagtcacatatggttgtaacaatttcaaatgatttgcttaatcttaactctgtattaaacagttcaaatgtcatctggtagcacaatgaatatggatagcaagtatataaactagagcttgaaacatttaacagctaaataaaatttaaaagatattacaatagttaaccactacatggagtacactaatttttattcccaataatccatttgaaatgtattccacagacacttgcattttaattcaaagtcaaaaaaacttccataagctaatcaaaaataactagtcgcaaactgtgcttaagtcactatataaattaatacacccatggtactcttcagtaacagaatgtgttctaaggctgcaacaacaccctcagcatatgaacaacaaacccattctctaaatatgcatgaaaataacagttaatatttattgcacaaactgtgtcaggcacaatgctaggggatttacatactttacctctaattttctgttttctttctttttaagatggagtttcgctcttgttgcccagactggagttcaatggcctgatctcggctcaccgctgcctcccaggttcaagcgattctcctgtctcagcctcccgagtagctgagattacaggtgcccgccaccaygagcgactaattttttgtattttcagtagagacggggtttctccatgttggtcaggctggtctccaactcccgacctcaggtgatccgcccgcccagcctcccaaagtgctgggattacaggtgcgccaacgcgcccggccactattatatatttatctctaattttcataactccctaagttaagcattatcatcctcattttacagatgaggaaaccgaactgaggttcatggagggatccaacagccaggaagaaaatgtagaagactcctaaattttcaacagctctttctctatataaatcacccaagatctgaaagtatcgattgtataatttatcaattaactcttaagttctggaaaatactatgctggcagctggcaatatatgttacaggaactctgtggggatctcaggggacttgccttccaaggctgtgtatttatttctttatttttttgagaccatgttctgctatattgcctaggctggccttgaactcctgggctcaagtgatcctctcacctcacactcctgagtagcagggactacaggtgactactacatgactggcaattttcatttttttaatagataccacaaatttcctccaggacctgaatgtatctatgtcaattctgtawctaggtgtactagttatggaatacagaagatcattaagccaccatagtcttctcaaaccctgaagaaatgatcaaaactcagatgtttcctcagaacccaagtttattctgctaacaagtaaacctcagaaatgggcctagaattttatctctgatcacagttatgtctactacagactatagaatccatgatttaaagacatattcttccaggcataaaagcagagtggtatttgaaaagacgagcgtactccatcaaaatgtgatgaagaaatcataacagaatgccctaaaaatagccaaatatgccaaatttttagaaattgagacgtgtccaattattcctgtcagactggtatcctattacttagaagatcttgtttcacatattataaatgggtagactttcagtttgactttaatcatcttttcatttaaaagtttttgtcatcaatgatatttaagctaaaaaaggtttcttacagttacaattaggtaaactataaccatgaagwtatatatatatatatttagaaaattttattagaaaaaccatttgctgttcactaatcctaatttggaaagcacctcttcttcaccttttacttaactatcccaggacaattacacacggagcatgatagtcccaataatttaagtttctttataaaaacaagctcaacagagtcaccctttgcacctagtcacagcaacaaaagaaaacaaaacaccaaaaaacttcaaagcccacaaagatttgttggcagcctaaggctcaggaatcaaaacgtgtgtaaatctgatcccgggggaccgtggcactgacagtcattcaactttctttttaatattcccattgtgctttttctggtaccacagggaaaatgtacctacattttaccaaccggtcgaagctgaaaattctcttggtgcaaggccaggggatgcggccgtggggcggccgggggagcccggggcaccggcgccagccacacgagagagcagtaccacgctcttggcaggcctgctgtggctggctcccgagtccctggggctgcaagagcagccgcggaggcagcagcagcagccatggcagggactcggaaacctttcccctgcctcctccgctaggcctcgaggggtttgcttttcacatggcccccgggtgggggcggtgggcacaaggcagtgsctgcagctgcagccggagccgcagccgcgggccaggcgagcctggctcactcggaacccgacctaacggcgggctggcagcagcgggacgtcagaaggccctggctgaagcgccgacgacccggcggggaaggccacctttccacacaccacatctctcccctgcctgcctccttctccgttagcgctaccggttggcgggcgggggaggggagcaaggcgcgttattcccggggagctggacgggggagggaagggcatctcttacccgcgttactgaggaggaggaggcggttggagcgcggcgcggcggggcgacggcggggctgggtgggtgcaagtaagagtcttacgaaagggaattaaccccatcaccagcccggacaccggctccagcggcagccgcggctggcagaatcccgccccttcccaccacgcactagccccgcctcttcgttctctttgagcggcagccgactattcataggttgtacgtccccggagtgacatgagttttgcccaatcaagcttgaaaaaaactgtcttctctccacccctttacctcctcccaggccgcggagagccgtgccaaatcttcctccaacctcaagagaaaaagaaccaatccgtggtaagtaaccgcccttgaaggacgcaaaagccaaccaatggtaaaactaggaggacagccattttgcccacttgtaaaagagctaccttttcccacgagttggagcctgaggtgcggagtttcgtgagtttttactgactcgaggtatttaaaagacaaccagatctcctcagtgggtatttatagtgctttttaggggtaaaggaaaattatcctccatgtggggcgaagtgaggcatgctgcttaaggggttggctcctccccttagcgctaacgggttctgaaacgaacacctggtttctccagcttcagtggcggagggcggggtgattgctcttttcggcctggagcggactacgattcccaacatgcttttcccytactcataacttctcctccgttcacttgtcgcggtgcttggctggaattgtagttcytgagaggtacccatgccgccgcttcagccaatgaaaagggacagagttttgaatgacttgaaattagggcggagaacgagttgtcgcgaggctgtacagagcccttttcgcaaccctaacgggagagaartgatggaagaagggtagccggaagagtttcctcaaaataccataggggttttaaattattagtacgtatttaaactcatctactttcacgttgtcccgttgaacgtcacttccgcttaggggcggacacgtcccaaacctgtggcgggagttggagattctgcggcgaatacgccaggtgtgactggctggaagtggcgtggctggcaagtcgctagtttcttgcatgggagataaaaagttgaacggaatttaatggcattttaagaaagagtgggtgacatgggatgggggtaatttccagggcccttattactttctccaccccggccttcaatcgcgggcgtctcggcctgctcgctattagattgcacggctaaatttgtagaaagtacctctactgcctttagtcttcgcgtggtcagtttgaactgtaaagacagggctccgaagttctgaactacatttacagacacactttttttttttttttttgagacggagtcttgctctgtccccaggctggagtgcagtggtgggatcttggctcactgattcacgccattctcctgtctcagcctccggagtagctgggattacaggcgcgcgccactcagcccagctaattttttgtatttttagtagagacggggtttcaccatgttggccaggatggtctcgatctcctgacctcgtgatccgcccaccttggcctcccraagtgctgggattacaggcgtgagccaccgcgcccggccacaaacacacttctaaagtcagcttggaaggaaaagagtcacagaaaagggcttttctgtttgaaggattgataatcaagagtggccccatcaccactctttgagtaacgaccatttattaaacgagtggcagacaggcgcggtggctcagacctgtmatcctagcactttgggaggccgaggcgggaggattacttgaggtcaggagttcgagaccagcctgggcaacatggtgaaatcttgtgtctgctaaaaactcacacacacacattagccggacgtggtggcagagatctgtaggatctgtagtcccagctacacgggaggctgaggcaggagaatcgcttcaacttcggaagtggttacagtgacccgagatcgcgccactgcactccagcctcgggtgacagagcgagactccgtctcaaaacaaaaacaaaaacaaaaaacgtgtgactacagggtgccaactataatacaccgatgaataaaggcatcactaaaaagatgcctttattcatcggccacatggagcccacagcctaataatcttagcacgtaaggccctgatttatgcctccttcagagttcaagggcgactgtatgtatacttttggacattccatttaaggtacccaggaaaactgattgaataaagaagatacaagttacagaaaagggtttttccctccctatgcgtgtgccctttattcttaaactctttgctttattattttgactgagactttctcagataaattctaattcagtttactccatgattttactgagattttctcttataaatcctgttgtatttatggtatgagcgcttaacactgtattgggtactataccagactttgggtagagcagtgcctaaaaagacaggctccttgtccaaaagttgtgaggaagagagaggctaaacaaaattgtaatgtcacttactgtttcaatctctaagtcaagtcttctttagtcacattttgtatgtttatttggtcccttctttacattctacctttggattaaaataagcacgttttcctctttgcattgtttttactaaagcactaatctgtgtccaatactaacgagtgatgtttgtatacaaagtaagatggtaaattttatagtgtaatcctgctagatataggaatgtaaccataccttgcagcaagacatttttgtagatctaccaggcaaagtgttgtctcttgctttttaatgcaattaggatattcagtgataatttagcaatgcagtctactgtagatgcttagtttttttttttatttgtttgtgtcaggagttcttccagtgtaaatctagtcactaaatagtaatgatggccatcattttattgagtttcgtctgagccagaaatgatgttatgtgtgataagtacattttccttatgacaaactgtaagtcttcttgacatttttatatttgaagaaagtgaggctcaatgaaggtaaataagacttgtagaggtctgacctggtggctcatacctgtaatcccagcactttaagatgtcaaggcaagagaatcacttgagtctagcagttctagaccagcctgggcaacataggaaatttcagtctctacaaaaaataaaaaaattagctgggcgtagtggtgcacaactgtggtccagctacacaggaggctgaggtgagggaatcgctggggcccaggaggtcaaagctgcaatgagctgtgattgagccactgcactccagcctggggcaacacaggagactctgtctcaaacaaaccacaaaaaaaaaaaaaagagctttaaggtctgaggcccctattaaataaatttgagttgagattcatatccaggcctgtctaattcctgaactcttaaccactattcatcttgcctttcaaatttttattaatccttcaacgtgtgccagacacataatgatgagggaaacaaaattccatcccaggattctggagccaatggtggcagtcacttcctcttgtaagccatcttttgccatgtacgtaatacttagtccacacgggaaaatgtaaaaaagaaagtaaaggtcatctgcaattctattaccaagagatgccactgtttacacatatctctgtctttagttacaggtatggacacatgttttaatgatataatgctttgctttttttaaattgaaaaaacttgcmacagtgggctatggttgtggctgaatagataccagtattatcatttgtgatagctactttattgtatagctctagcataaccaattccctgctgatggatatttgcattgttttcaattaataatttattttttattgtgttaaaaacgcataacacaatatatcatcttaaccatctttttttttctttttttattttgcgacagagtcttgctctgtcttccaggctggagtacagtggctcactgcaacctctgccaactgggttcaagtgattctcctgtctcagcctcctgagtagctgggattataggcatgcaccatcatgcctggctaacttttgtatttttaatagagatggggtttcaccatgttgcccaggctggtctcgaactcctgacctcgagtgatccacccacctcacctcccaaagtgctgggattacaggtgtgagccaccgtgcctggtcatcttaaccatttttaaatgtatagtgtgaccctgagtcttctctgaggccccatgtgtgggtgccagatgattgtcgacaaaaagagtcaaactgtaaaatatgaggagatttatgctgagccaaatatgagtgaccatggcccatgacacagccctcgggaggtcctgagaacatgtgcccaaggtggttggggtacagcttggttttatgtattttaggaaggcatgagacatcaatcaaatacatttaagaaatgcattggtttggtttagaaaggcgggacaactcaaagtggggacttccaggctataggtaaatttaaacattttctggttgacaattggttgaggttgtttgaagacctgggattgacagaaaggaatgctcaggttaaagataaaggattgtggagaccaagttttattgtacagaggaagctcttagatagcagacttcagagagagcaggttgtaaattgttttttatcggacttaaaagggtatctggctcttagttgattatctgctggatttgggaaggaaggtaggaaaacaaagggggaaggggattcactatagaatatggattttaaccacaagagactttgcaggacaattttaaggtatggcaaggaaatatattttggggttaaatatttcttccttgtctcataatgttatgccacagtcagattgaaaaataaatcacaatatatagtttcaaataaaacccccctgatgagaatttatggtttgtagggcatgactccctagaccccttagttaggaatttgggtaaaataaaaaaatcaggttgggctcattggctcacgcctgtaatcccagcactttgggaggccaaggcaggcagattacttgaggtcaggagttcaagaccagcctggccaacatggtgaaaccctgtctctactcaaaatacaaaaattagctgagtgtggtggcgggcacctgtaatcccagctactcgggaggctgaggcaggagaatggcttgaacctgggaggtggaggttgcggtgagccgagatagtgccattgtactccagcctgggcgacagagtgagactccgtctcaaaaaaaaaaaaaaaaaaaaaaaatcatagcttagtcctcaagtacaattaaatgtaccttgtgcaatagctatctagaactttttcatcttgcagatgtgaaattctatacttatcaaacaacaactgcaactcccctgtatcctttgcaccacagccaccattccactttctgtttctgaatttgactacatactttagatacckcatgtaagtggaatcatgtagtacactatttcactttttgtggctaatttatttcactttctataatgtcttcaaggttcatctgtgcagagcatgataggatttcctttttttttttttttttttgagacagagttttgctcttgttgcccaggccagagtgcaatggtgtgatctcggcccactgcaacctcctcctcccgggttcaagcgattctcctatctcactgtctcgagtagctgggattacaggcacgcaccaccatgaccggctaatttttttatttttaatagagacggggtttcgccatgttggccaggcaggtctggagctcctgacctcaggtgatccgcccgcctcagcctcccacagtgctgggattacaggcgtgagccattgtgcccggcccaatcctgttttcagttctttcrgatatatacccagaagtacgattgctgaatagactaggttttataggtaatgctgtcatgtgcactctctttgtatgcttccctgattatcccttgaatctaaccttttagaagtaggttttttagccacaaatactctgtgatttctaagttgctcttcagaaaggatgttcccattttctttcctactaatggtgtttgagagcacccatttcccatgttttactctattcaatctgatctaaaaggtgatggttcattatatttcatttgtatctagttgaattctattgatgtagagcatcttttttatgtttattatcctttggtgtttagtctcttttgtgtagcctgttgctgtcattgtctcttaatattttttaaaaattacttcataggctgttaattctttgtcatatttctcacatctttactcccattttgaaatatcttttaactttttaatgttttcttcctatggctagaagtttaaattattttagtgtccaaatctatccatctttttttatagcttctaatttatttgtgatgcttagaaatgctttccccaccccagattagtaaaaaaattatatatctaattaaaacatttttgtattttataatttatctgtaatttttttggtataaggaacaaaataaagattaatcttttttaggctaaacccaataccatttattaaataattcatctctccatacccattaatttaaaatataattttatcatattcacaattctcatttatacatggttctctttggacactgttctttttcattgttctctcttttctttgacttgtaccatacccattatcttaatttctgtaactttgtaataatatgttttggtgtctagaggtaaggtgtgttcccgctcttctttttcagtcattttcttgttattctcagcttttcttgtaatttattagttagatttttgtcaagttaaaaatctctgcactttcatattttaacaaaatgcaagtttgacatttatatatataccaaatatgacttcttaaagccaagtatttcatttcatagtaacaatacagaatttttcttgggtgtcatcgagaatcaatgggtcattctatgctttgttaaaacatatttctattatagaattctacaggatggtcgcggtggcttaagcctgtaatcccagcactttgggaggccgaggcgggtggatcacctgaggtcgggagttcgagacyagcctgactaaaatggtgaaaccccgtctctactaaaatacaaaaaagtagccagctgtggtggtgcatgcctgtagttccagctactcaggaggctgaggcaggagcttgaacccgggaggcccaggttgcagtgacccgagattgtgccattgcactccagcctgggcaacaagagcgaaactctttctcaaaaaaaaaagaaaaaagaattcgaccaaaatggttacaatttaaaagcccatcttattttttaaattatataatcactttttaaatatagatacttgtattttgtaggtggcttccaggagaacctgataacttctaaatgcttatctgtaacttaaaactgtttatcccactgtacttcacagccttctccaagtacttcaaattcagcatgtcccaaatcatggcccacaatcttcacccctaaatctgttctaccctctgtattctctcatgtgtttatttgctcagggaatatttactgagcatctactgaaagaggtactgaataatcaagactataggctggagtctgcctaggcttgattctttgttgtgtcatttacttgtgttaccttgggcagattagttgaccatctgtgtctcagtttccttatttgtaaaactgagataatgagaatacctaccttagaggcttttgtgaggatcaaatgatttaatacataaaatacttaaaacagtacctgacacataataagtgtgtgttgcttttttattaatattgtttccgttaatcaggctgatgctagatgctagagtcctgaaataaaaccataagaaagtctatgattcctgatttatgaagacattctaacagaagtgagagacaaaatttaaggaaacagagaagaataattgccaattacaataagtactttaaggaaaccaagtggtattaagggaaatttagaggagtccagttgggagctgttgtgctaatcctgttgagcggtgatgatggcttggatttggtgatagcagtggaacttgggggggaaaaggatagacttgagatacattaatattttgggaataatgaataataagtggattcaacttggtggtttagggaaagggagaaatcaagaatgaaacccagtttgagtaacttgcatggttgtactatttactgagactacaggggcacacaaatttggtgagaaatcaagactggttttggacttttaagctaaaaatgtctgtttggatattggagatatccaaaatgtcaggtaggtaattagatataggagtctatgaagagattatgaattgtattacctggactatttgtggtagccttctaaaaggttattcctgcccccacattcatttttctaaacttgacaaggtaatctttgtaaaatmgcaatctgattacactttaaaaattgcttccaattccttacagaaaaaagtccaaactcttagcatggcacctctttgacttggcctgtttttacttctttactacatgtcacaaggatcttattctttagctatactaaactgcttaggattttctaaaactttttttttctttttcttttgagatggagtctcactctgtcacccaggctggagtgcagtggtgtgatctcggcctggctaatttttgtatttttagtagagacagggattcactatgttggccaggctggtcttgaactcctgacctcaggtgatctgcctgcctcggcctcccaaagtgctgggattacaggcgtgagctaccttgcctggccagattttctaaaactttatgcctttgcaactgtggcttttttctccctgttggggaaaccagccccacaccacccggcgggtaccccaagtccagcagaaacaaaggaattagaaagagacagaataagagtttaaaaggcgagtccaggggactggagcatcggaggcttgctcgtagcctcaagctgttggcctccacccaatttattggtttacaagctctttgttcttagggcaaatgggaggaataggaagggaagaggaaaaggattaatcagtgaaggagaacttgtgagtcattcaataagatgttatagcagtggcggtttctgtgaatttccttgagcaaaggcgtgtgtctaaactacttaagatctttaacttttcgggactgaaattggtgggagtgggtttcaggagaatccaagttgtttgattatactcccctgcttcaagggagtgttatttccctgagcaacctgtggcatgctgcagagctgttatgctctaggagcataaagacatgaaggcagtaaggagacttttctcctcagaggccgcccatggctccccatgggtgtctcacacaggggagaccaactcatctggcacccagaaactgtctttcccacactctctagaatatccttatcatgattctctgtctgcagactccactcttcaagttttagcgtgagtggcatctggtatttaagtaaggtgtaccataccaagcattttttctcacaagtgaaggcttttttgattacttgctgccgtataaagccaatgttccctcttatgtgtagtgccttatatatattctattttcatagcacttatcgcattgtgttgtgttgtttacagctgtcatttcccctgggcttggatgtgaggctacaatggcacaaattcatcattgtttacccaataccttctgtagtgtctgaagcatagtaggtatttatttatttatttatttttgagacgaagtttgctcttttttgcccaggctggagtgcagtggcacgatcttggctcaccgtaatgtctgcctcccgggttcaagcgattgtcctctgtcagcctcccaagtagcttgccaccatgcccggctaatttttgtactttcagtggagacaaggtttcaccatgttgatgaggctggtcttgaactcctgacctcatgatctgcctgcctcggcctcccaaagtgctgggattacaggcatgagccatcatgcccggccataataggtacttcttaagtatttcttgagtgagtgatttggagaggcaatgttgcataatggcaaaaattcagacttttaaattagaccaacctgagttctaggcctaatgtcaccagttgctaacttttaaacctcgtgtaagttatataacatttctgaacttttaaattttcttgtccttaacgtgaggataattatatttatcttatgagttgttttgagaatttcaagacttcttctaaaatttcctagtgtagtggtttgcagaaagaggtcacccaataagtgggaattattttatcattaatctgaaaacagttgcctgtagaaagaaagattgtaatattcttgcttttaaagtaattggaggctgaggtgaaaggattgcttaaggccaggagttccagaccagccttggcaatgtaatgagaccctatcacaacaaaaattaaaaaaaaaacaattagcctgaccaagatggtgtaaccccgtctctactaaaaacacaaaaattagctgggcgcagtggcaggcacctgtaagcccagctcctcgggaggctgagacaggagaattgcttgaacccaggagccggaggttgcagtgagccgagagcacaccactgcactctagcctaagtgacagagcaagactccgtctcaaaaaaaacaaacaaaaaaacaattagccaggtgtggtggcagatgcctgtagtccaagctgtttgagaggctgaggcaggaggattgtgtgagcccaggagtttgaggttgcagtgagctaatattgcacccctgtactccaggcagagtgacagagcaagactttgtctcaaaaaaaaaaaaaaaaagaaatccttttttctytttgaggtggagtcttactctgtcacccaggctggagtgcagtggcatgaacttggctcactgtaacctccgtctcctgggttcaaccgatctcctgcctcagactctccagtagctgtgattacaggcaaggcacctgccaccatgcccggctaattatttttatttttatttttagtagagatgggttttcgctatgtttgccaggctggtcttgaactccttacctcaaattatccacccgcctcggcctcccaaagtgctgggattacaggcatgagccmccgtgcctgaccaaaacaaaaaaaaaaaaaagaatttaagtggaaaaaaaagatttaatgaagagggagtgattactgataggtccggtaagatgaagacagagaattccttactgcttgcttccttccttttacctccggttcacagcctttatatataccatatcctcttcctaaaacactctttgatcccttcctctctggttaatgttgttgaagtatgaactttgatgtatgtatatttagaagccttccaaacactctaatctgaaaaattagtcccgtgtgtatgctcccttaacacccagtacttcccctgtagtctttcttcagaactgcatgtaataatatatttactattatatatctggagcctagcacaatgtctgctacatgtgaacaaccgaatacacatttgttgaatgcatgaaaaaatgaaattcagggagttggatgattacttttcataggatataactgtttataggaccagtatattaatatttaaaatagatattttcagtgggatttagccctgaagtagagatggagcattcgtgtgataaaaagggatgaaagacccaaatataggtcttacttctgctgttagctacatgatcttggagttttatctttctgagtcttgctctgtttagctcactgcagcctggacctccctggctcaagtgatctttctgctgctgcctcccaaagttctgggattacaggtgtaatcatcatgcccaagccagggtgttttgttttttttaatctaaaaaagatcatactttttgagttcattgtaaattcacgggaaattgtaagaaataatgcggagagatactgtggacctttccctagtttcctccagtggtaacatcttagaaaactacagtacaaycaggatattgacacagtcaaaatagagaacatttccatcccaggaggatccctcatgttgccttcttatagccacaaccacttctatcccacccyaacctaaccactaatctattatccatttctaaaattttgtcctttcaagtaggtcgtgtaaatggaataaaataataaatggaattaaaaataataaatgggctctccctgataaatcacctaatctgagggacagaaacagtttcccctgtccaacaatcagctccaaattctccctcctgaaccctattattttggaatttttgatagcaacaaacagaagtaggaagcaagattaagcaaacaaggaaataacatgctgcagtgcctctcagcagatagatcttctcagtaggggaagcgtatagaatagcagctgaaaatgtggcatatgacatctatagccacatgacctgagtttgtgacccagctccataactacaagttacaggactatggtggctggcaagatggctgaataggaacagttccaatctgcagctcccagcgagatcaactcagaagaccagtgatttctgcatttccaattgaggtacttggctcatctcattgagactggttagatagtgggtgcagcccatggagggcaagccaaagcagggtggggcgtttcctcatccgggaagtgcaaggggtcagggaactccctcccttagccaagggaagctgtgagggactatgccgtgagaaatggtgcattccagcccagatactatgcttttcccatgggcttcgtaacccacagaccaggagattccctagggtacctacaccaccagggccctgggtttcaagcacaaaaccagacagccctttgggcagacaccaagctagctgcaggagtttttttcataccacagtggctcctggaacaccagcgagacaatcattcactcctctggaaagggggctgaagctagggagccaagtgttctacctcagcagatcccaccccatggagcccagcaagctaagtagatccactggcttgaaattctcacttccagcacgcagtctgaagtctatctgggacggtcgagcttggtagggggaggggcatttgccattactgaggcttgagtaggcggttttcccctcacggtgtaaacaaagctgctgggaagttcgaactgggtgcggaacccaccgcagcacgcaaagccactctagccagaatgcctctctatattcctcctctctgagcagggcatctccraaagaaaggagccccagtcaggggcttatagataaaattcccatcttcctgggacagagcacctgggggaaggggcagctgtgctcacagctttagcagacttaaatgttcctgcctgttggctccgaagagagcagcatatctcccagcacagcactcaagctctgctaagggacagactgtctcctcaagtgggtccctgacccccatgccccctgactgggagacacctcccagcaggggtcaacagacacctcagacaggagagccccagctggcatctggcagtgcctcctcccagaggaaggaacaggcagcaacctttgctgttctgcagcttctgctggtgatacccaggcaaacagagtcttgagtggacctctagcaaactccaacagacctgcagcagaggggcctgactgttagaaggaaaactaacatacagaaaggagtagcatcagtatcaacaaaaaggacgctcacacaaaaatcccatctgaaggtcaccaacatcaaagaccaaaggtagataaatccacgaagatgaggaaaaaacagcacaaaaaggctgaaaattcccaaaaccagaatgcctcttctcctccaaaggatcactcctcgccagcaagggaacaaaagtggacggagaatgagtttgatgaattcacagaagtaggcttcagaaggtgggtaataacaaacttctccaagcttaaagagcatgttctaccccaatgcagggaagctaagaacttcgaaaaaaggttagaggaattgctaactacaataaccagtttagagaagaacataaatgacctgatggagctgaaaaacacagcatgagaactttgtgaatcatacacaaatatcaatagccaaattgaccaagcagaagaaaggatatcagagattgaagatcaacttaatgaaataaagtgtgaagacaaggttagagaaagaagaatgaaagggaatgaacaaagcctccaagaaatatgggactatgtgaaaagaccaaactatttttgattggtgtacctgaaagtgacagggagaatagaaccaagttggaaaacacacttaaggatattatccaggaaaacttccccaacctagcaagacaggccaacattcaaattcaggaaatatggagaacaccacaaagatgctccttgagaagagcaaccacaagacacataattgtcagattcaccaaggttgaaatgaaggaaaaaatgttaagggcagccagagagaaaggctgggttacctgggtaacgaagggaagctcatcagactaacagtggatctctcagcagaaaccctacaagccagaagagagtggggtccaatattcgtcattcttaaggaaaaggattttcaacccagaatttcatatccagccaaactaagcttcaaaagtgaaggtgaaataaaatcctttacagacaagcaaatgctgagagattttctcaccaccaggcctgccttacaagagctcctgaaggaagcactaaacatggaaaggaacaactggtaccagccactgcaaaaacataccaagttgtaaagaccatcaacactgtgaagaaatttcatcaactaatgggcaaaataaccagctagtatcataatgacaggatcagattcacatataacaatattaaccttaaatgccccaattgaaagacacagactggcaaactggatagagtcaagacccatcagtgtgccgtgttcagaagacccatctcacgtgcaaagacacacataggctcaaaataaagggatggaagaatatttaccaagcaaatggaaagccaaaaaaaaaagaaaaaacaggggttgcaatcctagtgtctggtaaaacagactttaaaccaacaaagatcaaaagagataagggcattacataatggcaaagggatcagtrcaacaagaagagctaactgttttaaatatatatgcacccaatacaggagcacctagattcataaagcaaattcttagagacctacaaagagacttagacttccatacgataatagtaggagatttaatgccccactgtcaatattagacagattaatgagacaaaattaacaaggatattcaggacttgaactcagctcaggaccaagcagacctaatagacgtctatagaattctccaccgcaaatcaacagaatatacattcttagcaccacattactcttattctaaaattgaccacagaattggatgtaatgcactcctcagcaaatgcaaaagaatggaaatcataacaaacagtctctcagaccacagtgcaagcaaattagaactcaggattaagaaactcactcaaaaccgcacaactacatggaaactgaacaacctgctcctgaatgactactgggtaaataacgaaatgaaggcggaagtaaataaattctttgaaaccaatgagaacaaagacacaacgtaccagaatctctgggacacagctaaagcagtgtgtagagggaaatttgtagcactaaatgcccacaggagaaagcaggaaagatctaaaatcgacaccctaatatcacaaacaaattcaaaagctagcagaagataagaaataactaagatcagagcagaactgaaggaaatagagaactattaatagcctaccaaccaaaacagcccaggaccagacagattcacggccgaatttgtaccagaggtactaagaggagctggtaccattccttctgaaattattccaaacagtagaaaaagagggactcctacctaactcattttatgaggctagcatcatgctgataccaaaacctggcagagacacaacaaaaaaagatgatttctggccattatttctgatgaacatcgatacgaaaatactcaataaaatactggcaaactgaatccagcagcacatcacaaagcttatccaccaagatcaagtcagcttcattcctgggattcaaggctggttcaacatatgcaaatcagtaaacgtaatccatcacataaacataaccaataacaacacatgattatctcaatagatgcagaaaaggccttccataaaattcaacaccccttcatgctaaaaaaaactgtcaataaactaggtattgatggaatgtatctaaaagtgataagagctatttatgacacacccacagccaatatcatactgaatgggtgaaagctggaaacattctctttgaaagctggcacacaaggatgccttctttcaccactcctattcagcatagtattggtagttctggccagggcaatcaagcaagagaaagaaagaaaagatattcggataggaagagaggaagtcaaattgtctgtttgcagatgacatgattgtatatttagaaaaccccatcatctcagcccaaaatcttcttaagctgataagcaacttcagcagtgtctcaggatacaaaatcagtatgcaaaaatcacaagcatttttatacaccaataatagaccaacagagagccaaaacatgtatgaactctcattaacaattgctacaaagagaatgaaatgcctaggaatacaacttacaatggaggtgaaggacctcttcaaggagaactacaaaccactgctcaaggaaataagagagggcacaatcaaatggaaaaacattccatgctcatggataggaagaatcaatactgtgaaagtggccatattgcccaaagtaacttacagattcaatgctatccccatcaagctaccattgactttcttcacagacttagaaaaaactactttaaatttcatatggaaccaaaaaagagcccgtatagccaaaacaatcctaggcaaaaagaacaaagctggaggcatcacgctacctagtttgacttcaaactgtgctacaaggctacagtaaccaaagcagcatggtactgttaccaaaagagatatataaaccaatggatcagaacagaggcctcagaaataacactacacatctacaaccatctgctctttgacaaacctgacaaaaacaagaaatggggaaaggatttcctattgattccctatttagtgaatggtgttgggaaaactggctagccatatgcagaaaactgaaacaggaccccttccttacaccttatccaaaaattaactcaagatggattaaagacttaaacataagacctaaaaccataaaaaccttagaagaaaacctaggcaataccattcaggacataggcatgttcaaagacttcatgtttttgcttttagtgttgttgtctaaaaccataccataacccaagattacaaaggtttactcttgtgttttctccttgaagttttatagttttaactgttatgttttaatctttgatccattttaagttaattttcatatgcagcatgaggtgggggtttaatttcattcttttatatgaacatctagttgtctcagcactatttgttgaaaaagttactcttttcctattgaatcctcttaggacccttgtcaaaaaattgactgtaaatgtaaaggcttatttctggactttcagttctgttccattgacctagctggttgtcattatgctagtagtgctacactgccttgattattgtcactttgtagtaaattttacaaccaggaagtagaagtcctctagctttgttcattttcaagattgttttggctattctgggttccttgcatttccatatgaattttagaatcagcttgtcagtgatcgaattttgaaagtataatcagctgtgcattcctgaaataagcccattttagtcttggtgtcttagtcttttaattactgctatatttggtttgctaatattttgtttacctatgaatatgagagattgtattatgtatgttttttcttgtaatgtgcttgtgagattgtttaggctggcttcacacaatgagcttgaaaataatactcctgtctttgcaccaaatgggtcagatttgtttattgtattcttgaaatcatctttatcctgttacaatttaatcaacttgcataatcaattactgagagacatgtgttaaacttttccactgtggttatagatagatatggttgtgtcaaattttccttttatttttatcagtttttgccttgtatatttattaagatatattttgaggctaaatttttctaataaatcttttatcattataaaatgcttttctttattttmataatttttttttgcctgaaacctatgttatcttataatgtaaagcaatactagctatactttggcatgtataatatgtcttttttaattcttttactttcagtgtttatgaatcctcctatttaagggtatgtcttttaaaagcaacatgtaaatttatatatattttaatttaatataggaatcttttcatttgtttttagtccatttacatttaatatcttttctaatttactaattctttattctgcagtaaatttcatccaatacattcttaattaaaaaaaaaaattatctccccaaagtttatatagttgtcctgacccgccatttacttgttgtttctgaaataagtctctaggtagtgtattttaacaatatctgattctyctcagtacagttctactatttacttaaatgagtcagtgaattccagttgaatttgccttgttctcaattgagtacaaaaacactatcttgacctaaaaagatagaaagtatttccttctttctttttttcaagtgttgcgtaccataccaagcaaattgcttagaaaataagttctactagattttgctttcactaaatttccctagccaatattgtcattttgattttaataacatggtattaaaaattatgtattgctggtgcggacacagttgcatgaggggtttctgccatcatcagtgctgtgtagcagagttagttcctctccagctcagccgcacaggtttggacatatttgactttttcccctcagtttgaattgaccaaagcaatggtgatggagaaggctagtcccctgctggttgggtgggaatttgtgagacagcattacacactgctgaactaggccccagacatgctgcatagattttatggaaggaactcttcttatgtccatgggggattggattcaaatagaaagctagcagatgcagtttatggacagaaagaaatccacaggaaagtgatgtcacgaaacttcagcaactgccacaccaagattctccatgttgatgcttatgccacactaaatgatggtgtggtagtccaggtgttggggcttctgtctaacaacaaccaggctttgaggagattcatgcagatgttcgtacttgctcctgaggggtctgttgcaaatcagttctatgttcacaatgatatcttcagatagcaagatgaggtctttggtgggtttgtcactgagcctcaggaggagtctgaagaagtagtakaggaacgtgaagaaaagacagcaaacacctcaggtggtacctgatgattctggaactttctgtgatcaggcagttgtcagtaatgacgtggaagaacatttagaggagccagttgctgaactggagcctgatcctgagccagaaccagaacaagaatgtgtatctgaaatccaagaggaaaagtctgagctrgtattagaagaaactgctcctgaggatgctcagaagagttcttctccagcacctgcagacatatctcagacagtatgggaagacttgaggacattttcttgggcatctgtgaccagtaacaaccttcaacccagtggagctgttccagttactgggatacctccttatgttggtaaagtactagcttcacagycctgtacagagtctaagcctgaatctcagattccaccacagaaacctcaaagggatcaaaggatgtgagaacaacgaagaaatattcctccccaaaggggacccagaccgatctgtgaggctggtgagcaaggtgacattgaaccccaaagagtggtgagacaccctgacagtcaccaactcttcattggcaacctgcctcatgaagtggacaaatcagagcttaaagatttctttcaaaattatgggaacgtggtggagttgcacattaacagtggtgggaaattacccagttttggttttgttttgatgattctgagcctgttcagaaggtccttcgcaacaggcccatcatgttcagaggtgaggtctgtctgaatgtggaagagaagaagactcgagctgccagggaaggggactgacgagatgatcgccttaggggacctggaggccctctatgtgggctgggtggtggaatgagaggccctcctcatggaggcatggtgcagaaagcaggatttggagtgggaagaaggcttgctccatggcagtgaatcttcatggatcttcacgcggccatacaaaccctagctcctacagaatggtgaatttctttgaccagcctttggtatcttggagtatgaccccagtttgttataaactgcttaagttagtataattttacttcttttgtgtgttaatgatgtgtgctccttctccctctcttccctttcctgacctttagtctttcacttccaattttgtggaatgatattttaggagtaacggatttttcaagaagaagaagaaagaaagactgaatttccttgcttattttgcatgtacagactggatttttttyctaacagccatttccccaaaggaatgtgtcttgcgtattactgacatttggtacgtttcattcattggaatatttcttactttctgtgtgtttcaaaagcctgtgagaaatacaggatttgataacattttgaaggcaggaaaaccccaaattgttacttctttgagagtcacaaccactttctggtgtggagaaattgccattggaaaatttgacaattttgattctcgctggtatgtttaaaaactgaataaaaagaatagaatttttcttttgatattggatcacgaaacacttctaaaacctgtttttacagtgggtttggaaaatttgacaattttgattctcactggtatgtttaaaatttggaaaatttgacaattttgattcttsctggtatgtttaaaaacaataaaaggaayagaacttttcttttgatataggatcacaaaacaattctaaaacctaccgtttttaccattgaaatttatattgtggtataggttttaaatgtctagaatgcaactggatgggcttttcttgaactgttagtttttttgaagtagagttttttcatgtttaatttgtatttgtaaaaaaacaaaagacaaaatattcccaaaacccagataacaaccagaacaaaactgttgtgccttctgtttatctttgattttagtcttggcaattgtttaaagaaaaataattttttaatatatctagatttgttttattaggttcagatattgtttttaatatctagatttgttttattaggttttactatggttgacttatacttcatgtggggaattgtagaaaccctcttttatcaccttgtatgtcttccgttaacattatttgttataccttattctaaaattgagtctcaaactagaatccctttgaagacagatgcttctgtagaggttctttgacctaaatggttcagcatttgtagtaagttttattctggtatctaatcggactcctattcatagcccataagaaggaatgtgactttaataatggactttgctgatgtgctcctgtccacatttttttttctttaaatcatagccatatggtaaattttctattttgttatgattctctttcattggtgggcatgcagtgggtgtttcttggaaatggtcaatgtttattaaaatatttctggaagaaaatttttttttaaattatgtattcctggtttcattttgataggctccccccgccttgctataagtaaattagwatatatatattgaataaaaccttttaagttaaacctttgaactgaataaagtattcattattaaaaaggtatgcacattattgtaactgttaatttcttggtaatctagaatgaagttaaaatgtgcatcttcttttattaatgtaatgttgattacaactgactttttgtagcaattaaacctatatggctgaacctacatgagatattctttattacaccttttttactttagatcctataaatagaaaagaatattttaaaaattatttttaggattaacaaaaacattcatgttctattcattasattgtaccactacatatttttaagttctttatttatccaaatatctgtttaaatcatcaatgaaccacactataatcttaaattcaactgaaatttttttctgtacattttcataatgttttagatttcttttatcttcatatttaattttttctcttatttgtgcctattaaaacaaatttttgattaatataactttaatttcattgtttatttttacaaatattgtgccttggccaggtgcggtggctcacgcctgtaatcccagcactttgggaggcagaggcgggcagatcacgaggtcaggagattgagaccatcttggctaacatggtgaaaccccgtctctactaaaaatacaaaaaattagcctgacatggtggcgtgcccctgtagtcccagctactcgtgaggctgaggcaggagaatggcgtgaacccaggaggcggagcttgcagtgagccgagatcgtgccactgcactccagcctgggcaacagagtgagactccatctcaaaagaaaaaaaacaaaaaacaaaaaacaaatattgtgcctgagtcagtcctcataaaaataaatcatgtaagtggcaaagtgaccccaatttaccagatttttttggagtgtctattaaaattttttactaagtaaaatgtaaaggagtcgttttgttttgttattctctctctctcttttctttccctttccttcttttcttttctttcttttcttgatagagtctcgckctgtcatccatgctggagtgcagtgacaagatcatagctcaaattcctgggctcaagcagtcctytgaagcctcccaagtagttgggactacaggcatgcacccccacaaccagctaattttatgatcttttgtaagcaacaagatctcgctgtttgccctggctgatcttcagctcctgacctcaagctattctgcctcaacctcccaaagtgttgggattacagcgatgagccactgcacccagcaaagaaaaaaaaaaaaaggagtcttgaataaagatgatagacagcaacatttttttttwwaattttttacttaacttcttgccagtgttccaccctaaaacattacatcctttatcccattgaccctaaaaagtgcttctgaaactcctgttacttctggaaagtggacatggttttctgctgctgttagccttgccagaaggaattttacttaatctctgctcctttgagttttgactttctaaagtccacaatagtatatctgattagtagctctaaggcaggctgggaaagtgtctgatatttcttgtgtgtatccattstctatctctccctataggaacttcagactcatatattttcaagcatacccaacatttccacttcttatcttatagccatctcaaagaaaatctgtggattttttttctacccaatttatttattctgtagtccttaccatcccagccaattgcatcactaactccatcactctaggtccacattttgattctacatttctgttattctctacatgtaccgcatcagcagatgctgtttgctttacctctgatatacttcgtgaatcttttcagtttcactgctaaaggttttttgccttgtctgttgcaacctgaaaacagttttcctgctttcatgctttccctttttgctccattctctattccttgctaagttttgttatgggggtggtggtggtgagagggtcctagggagggccactcatgagtgtttatgaggaccttattcagacagaactgactcataaatcatttctaaattcaattgcctactgaagcagtggaggctttgttgagtggccaaatcctataagaacatttatctcctgcctccttattgatatctttgtctccttcaggtgttttttgaaatgtaagtcagattgtgtcattcccctgtttaaaccttccattgagtactgtccaatagaactttaagtgaagagagaaatgttctgtatctttactattaaatatcatagctaccagacacatgttactgttgagcccgtgaaacatggctggtgaaactggataactgaatttttaattttaattttaattaaacattttgttaatggtgtatgcgacagcacaactccattagcattccttcttaaaaaggaatccaaagttattatcaaggctgtatatgatttggctcttgtttatctcggtagcttcatcttacaccgttccctcctttggatcatcagccacattggcttttgtttttcttttttttgagatgaagttttgctctgttacccaagctggagtgcagtggtgcgatctcagctcactgcaaattcctcctcctgaattcaagtgattgttgtgcctcagcctcctgagtagctgggattacaggcctgtgccaccacacccagctaatttttgtatttttagtaggacagtgtttcgccacgttgaccaggctggtctcaaactcctgacctcaggtgatccgcccactttggcctcccaaagtgctgagattataggcatgaactgctgtgtctggtccaccttagccttctttctgttttccgaaaacaccaagccctttctcaatttgggtcctttgcagtgatgctctttcctcggactgctcttctcttaattttgatcctgggtggctttttacatctttcagaccataagccaaacagcacttcctaagacaggccactcttggtcagcctacctaaagtgaccagtactctcttaaattccttacactatttgtgctatattataattaatcatccttcccattcgatcaggtgtagctgaaaacaaaaaagaaaaaccgtcatatttatttatttgctaatttttagttttcccctgaagaatataaaccctacgagtgcgtgggtcttgcttctctaggttgtggcatgtagtacctatttgttattaataaataaatacttgctttgttcttgaccttcttagtagacacagaagttggttacttttttggatggaagagagcaatagttatataagtctgcatgtaattgaggaaaaaagcaaactttttttttttttccttgagacagagtctcactctgtcgcccaggctggagcgcagtggcatgatcttggctcactgcaacctctgcctcctgggttcaaatgattcttctgccttaggctcctaaatagctgggactacaggcgagcgccaccacgcccagctaatttttgtatttttaatagatatggggtttcaacatattggccagtctggtcttgaactcctgacctcatgatccacccacctcggcctcccagagtgctaggattacaggcgtgagccaccgcgcctggcccgcaaacttttttttaaagatgagataatatataaacagaaggcagggtaccatctaaatacaaaatattattatttgataggcattatagtgtagttgtataataggacattttcttccagagttataagaatttacagatatatgacatttttatgtcatagaaaattacagtaacatctgtggaaaaccagggggtgaggaaggtgttaatcaggcaaagtgctatactgtggattcagctcattaaaaagaattaattttaatatttaaacaatttaataatattacattaatttaattagtataaatttgattttggagttaatgtctttgtattttataatttttttaaatgtagctttacctcactcttagaaaatctggtgtgatatgaaaatgtggatccataaaaggatgaattattaaaggattcatctttctctagcagrttcatcccttattttaaaaattattcgatttgtgaaaaatctagtttatttataattttttagtaataaatttgtggtgttaaactggtgtatagtatatggtattatggctcaaaatgaaatagtgcatgctgagttcctagagagtgcattaagtaattgctttcaaactcagtgctttgaattttcttagtagcttactgtgagaatatgatttagtttatataaatggtatgtcaaagctatttataagtactttaatattatttatatgtgattctgtaacatacttagtaatatctatttcttatacccctcccttttttgttgtttctttgtttttaggatcatcatgcctagggttcataacataaaaaagtctcttacacctcacatttcttgtgtgacaaatgaatctgataatctgctggattttttgcctgacagactaagagcaaagctacttccattccagaaagatggcatcatttttgccctcaaaagaaatggcaggtaaagttctttgaagacatgctaaaaatgttaaattcctggaaagtgtattaaaaacaaagttctgttcaaactttcttttcgtgtattcacagtctttctttagtagaattgattgtgaccaagttagctttatccatttactatggttgacttatacttcatgttgaaatatattgaaccaattgtgatttcttaagagaaagtatgttcagttatcttaattatttcagttatcagatactctcagcaactcatatattgacagttttctagaatgtattgctttcacatgaaactaattcaacttatttccatcgttttttgtttttttgtctattaccagaaggatttttttttttaatagactctgccctttcacccaggctggagtgtagtggtacgatcttggctcactgcaacctctgtctcttggktttaagcaatcttgccacatcagcctcctgaatagctgggactacagggtgcacgccaccacacccgggtaatttttgtttttgttgtgtttttttaagggatgggttttcaccatgttgcccaggctggtcttgaactcctgggctcaagtgatccttctgccccgcctcccaaagtgctgggattacaggcatgagccactgcacccatccattgtattcttattctttttattttccacyttagatttagcaacttctgggtgtgttttatgagtaccttatactactgtctgtatttctttacttttttcaaactttgtgatagttatatgatctcttccatcaaattgggccattatatggttttctatatttttaaggataacattgtcttagttccacagtcacatatatcatatactttctcttcaacattttattatgaacagtttaaaaaacatacaacaaagttgaaagaatgttagagtaaatgcttggtagaggcaacacccacagtttattattaacattttgccatgcttggtctatcacgtatttatctatgaatccatccttctatccttctgtcccatcagtcccttttattattttcattcatttcaaagtaaattgcagacatcattatactttcccatatatacttaaatatatgtatgattaaccagaattcgtatttgtttacagacttttttttctgttgagatttaattaatgaaatgtacaaaccttgacaaatgcatatactcttataacccaaacccatcatcctagaaagttacttcattccctttctcagtcagtccccactctcacattgatctgatgttttgtattttgcctgtttttaatggtttatataaatggaatccagtaatatgtgctgtttatgaaaaacttcttaaaattattgtaatcttactgagtgagattcatgtattagtagtttgtgtctattgtacacatttgtatttatagctgttagttgacacttaaggttatatatctggtgtttttcaccttacacctgcatcttctcagtttttccagcctagacatcacttctgtagatttccattgcttttatggagttagaaaagttgtactcttccatattcacagtgttaacggtcctcagattcctgaagattcagtcacaaatgatattttaaactgccatttgacagcctttaactcctttaggtatttcatacttgtgtggttgggcttctcactatggcggagtagaaagaacgtacgctttaggtttagacttggttgaaatctgagccacttactatctctgtgatgctgtgcatgcttctttaacaattcatacttcagattcgttaactatgaaatggattttataatcctaattactgtggttaaaaaagaagcccgagttcttcataatggtgaaataaaatgccttttccctttttcatagctagacttagtaatttccaaacacttgtccctggactgttaaccagtcctaacaaaatatggatacatgtagcaaaatgagaaaataaaaagtgtgctgttcataaagcaaaattcattcattttagagaactttcatttattttgagcttaagtcttcttttttggaagcttagaattgtcctttcttttcggaaagcatgatgttagtagtggaaattttttattatgttttttggcaaatggaaacttggcaatgtttcccatcaagttttttgtttacttgcccatgaaataataatttcaggatttaaaaataatttaaggatatattttatcttgagttcattcttcagtaatattttcattggcaatataggtctgctgtaatagttatttttttcttagcactttgaaggtggtatcctcctgtcttctggcttccataattgtcattgataatacccttgagtctcaaaatatcaccttacagatgacttatttattacaaagggaaaaattacaaaatggccgagcttggtattgctaatagtgggacagccacatgcataatgtggtgcacgggagagacgtaacattaccttatgtggtgttcttactggaaacatttgatctaggaatcatggcgaatcagtccaactaatccagaatgtagaacattttttcaagacaactgacctggactcttcaaaggattcagtgtcatcaaaaatcaaaggaagtagtgtatcaaggaaagtctctaaattgagagagacctaataactataccatctgaaagtaatgcacgagccttgattagatcctggatcagcaaaaagaaaagctttagggaacgcttttaagatcactgggaaaatttcatcaggactctctttagatggtgttattggattaatgttgattatcttagatgaggtaatggtgttgtcattgaatagaagaatgttcttgtttctgataaatgcatgataaagaattttcagacaaagaataatagtgctattgttagtgctatactttctacattttcccaaaagggaaggacttatgttcagaaacattttgagtggatgagccaaaatgttaacagtgtgaatttagtgaggagtatattctggtgggtgtcttcattggtgagtggcataatctgtggggtacactcattgaattattctttttagcttttctatgagtttgaaatttttcaaaataaaaaaaaatcagtctaatttttgttcctttgtgcatcatctgacttgaagattttctctttgtctttggagttctgtagtttcactatactctattcagtatggttttctttttatttatcctgtttaggattattgtgcgttttaaatctgggatttgtgtctgttgattctaggaaattctcagctattccctcttcaaatattgcttctcccccatttgttttgtctgctgcaattccagttagatttatacttgacctttttacttcatcctatgcttctattaatgtctcttatattttctctgtctgtgctacattatgactgttttcaagttctctcatagaattcacaaccggctggtctaatctgctgtttaaccaacctgttcagttttttaaagtactttttttttttttttttttttactgatatgtaatttacatggacaaaggtacatagattatgaatgtatagcttgaagaattttcacagtatagcatcaccaagatcgagaaatagaacattgccagcatcacagaaacctccctcttgcctcttcccaatcattactatctcctttttcttgaaaagtaaccactatcctgacttctaacgttatagattgcttttgcctgttcaactatattattgtaattgtatattcttttgtatcttgtttttctcaacattattgtgagttcaatctatgtttttgtatgcggttgtagttcgttcattctcattgccatgtaaaatcccatcatgtgaatataccataatttattcattctactatggagcatttgggttatttctagtttggggctcatagaatagtaatgatatgaatgttcttatacaaatcttttggtgaatatatatacacatttctgatgtatatctaccaagaagaattgttaggtcataggttgtgcatgttttccactttagtagataatgcctatattagtttgctaggactatcataaaagcataccgcaactgggtggcttaaacaacagaaatttattttcccacagttttggaggctagcagtccaaaattaaggtgtgggcagggtttgttcctcttgagagctgtgaaggaattgtcttttccagggctctctttcttgacttgtaggctactgttttcttcctatttctattcacattgtcttccctctgtttatgtctctgggtccaaatttgccttttttatatggacactagtcatattggttacattggtgataccctaatgacttcatcttaagtaattatgtctgcagtgaccatatttccaaataaggtcacattctgaggtactgggggtttgaacttcaacatatgaatttgggtgatacataatacaaaccataccactgctaaacattttccaatgtaatttcaccaatctttacttgtatcaacagtgtttaagagttccacttatatctcatcctcatcaacacttcattttgcctatctttattttcattttagatattctggtaggtatatagtgatgtacattgaggtttttatttacatttctctgatgataagtaaaatttaataccttgtcatacgcttattagccatttggacatctttttttaaatgcctgttcatttcttatctgtttttcttctggattgtctatttgcctttttcttattgttttgtaggagtccttttgtcatatgtatactctggatatgagtcttttatcaggtatatttatggcaagtaaattttctcaggttgtgttttgccttttccttgtcttaatgatgtcttctgataagcagagattctcaattttaatgtcatcttacataatctttatccgcattcattctatggctggcacttctttcatcaaattttaaaaatctttgtctactactgtttggggaaatcagcccccagtattcaacatgggtccttttctattttccctaagtgtcggctggcctgagaaataaagggaaagagtacaaaagagagaaattttaaagctggatgtccaggggagacatcaaatgttgccaggttctgtgatgccccccaagctgcaaaaccagcaagtttttattaatgattttcaaaaggggagggagtgtacaaatagggtgtgggtcacagagatcccatgcttcacaaggtaaaatatcataaggcaaatggaggcagggcgagatcacaggaatggggagaaattaaaattgctaatgaagtttcaggcacgcattgtcattgataacatcttatcaggagacagggtttgagagaagacaaccagtctgaccaaaatttattaggtgggaatttcctcgtcctgataagcctgggagcgctatgggagactggggcttatttcatcccttatctacaaccgtaaaaagatagatgttcccaaagcggccattttagagaccttcccttgggaacacattctctttctcagggatgttccttgctgagaaaaagaattcagtgaaatttctcctgtttgcttttgaaagaagagagatatggccccggctctcaggcagccagacttaatggttatctctcttgttccctgaacatcgctgttatcctgttcttttttcaaggtgcccacatttcatattgtttaaacaatttgtgcagttaacgcaatcatcacagggtcctgaagtgacattcatcctcagcttacgaagatgatgggattaagagattaaagacaggcatcacaagagtattgattggggaagtgataagtgtccatgaaatcttcacaatttatgttcagagattgcagtaaagacaggtataagaaattataaaagtattaatttggggaactaataaatgtccatgaaatcttcacaatttatgttcttctgccatggcttcagccggtccctccatttgggatccctgacttcccgcaacatactacaaagtcatgaagagatttcctgtgttttcctctaaaagctttattgttttaatttttacactaattcgatttacaatctacttggaattgttttgtgtatatggtatgaagtagacatcaggattatttatttatttatttatttatttatttatttattatttattattttttagagacagagtctcgctgtcgcccaggctggagtacagtggcaccatcttggctcactgcaacctctgccttctgggttccagcgattctcctgcctcagcctcctgagtagctgggactacaggtgcacaccaccatgcccagctaatttttgtatttttagtagagacaaggttttaccatgttggcctggctcatctcgaactcctgacctccrttgatctgtccgccttggcctcccaaagtactgggatgataagtgtgagccaccgcgctcagcctcacttacttatttttaaatttatttttacatatgaatgtctacttgatccagcacaatttattgaaaagactttttcctactgcattgtaatgttacttttgtcataaatcaagtaattttatgtgtatacctttctagataagtgctgtctaatggaactttccgctgtgatggaaatattctttatgtgtactgtttaattcagtagctattcactgcagatggctattgagtacttgaagtgtggctagtgcaactaatgattgaatttttaattttactaattttaattaattcaaatttaaatagttacatgtttagtgcctaccatatggaatagtgcagttgtagattctttgttttgtttctctgtttgccatctttgtgtcagtaccatacttcttcatacttcttagcgtagctttataataaatattctggtatcaggcagtataaatctttcagccttrctctttttcaaaattgtctcagctattattgactctgcattacatataaattgtagaagtcatttatcaattttcacaaaagtgctggatttgtgaatggagttttactgcatctatagatcagtttggggagaatttatatatttataatacagagtatttcattccatgaatatgaattatttttacatttacttaattgctctttcggtgtcctgtatatctcttatctttttttgtgtgtgctgcagttttgatattttgtatttagccatattcaagcttactgattttatcttttgctgttaattaatttattggattctcttaaggatgagaccatcactcaatatacttgaaatgagaaaccactcaatttctttcttgataagcaagggagaactgtgcttcttagccatgacattctaaacaaagcgaagagttggtatygcattgggctttggaagcctgaagactttcaaaaacaggagtgtttaaggactgtctgaaatttctgtgtatagtttagggattagctgactaccagagaacagttagtcctttcctttcttgaaattggagaacagggacatttaactttctgttcttaatttcagaaagtatatttttaactcctagaatatcgagttcagctctgcctgcttatgttggtagtgtcttgttttttgcaatgttttggttctgtgtcgtatttctttaaatatttagaacatacttatttatgtaagtcatacttatttgcatatttgaggtcctttagaggttaattttgccttttattgttttatgtgatggtttatttcccagtgtatttgcagatgtcttaaattttgttttaataaataatcttaatctgcggatttcgktttttttttttttttttttttttttttaagatggagttttgctcttgttgcccaggctggagtacagtggtgccatcttggctcactgcaacctctgcctcctgtgttcaagcgattgtcctgcctcagccttccgagtagctgggattacagtcgcacgccaccacgcctggctaatgttttgtatttttagtagagatggagtttcaccatgttggctaggctggtctcaaactcctgatctcaggtgatccacccgccttggcctcccaaagtggtgggattacaggcatgagccaccacgcctggccagtctgtggaaattttgagagatgtaaatgagtaaattcttcaatggaggatttgcaaaattagattcttggcttgcagtttccaagatcacacaggtaatacaaattcaaacctcaagttcatttttaggtaggcttactattatgaattttgatcattaattttcatctcctgccaagctttaaatttccttgttagcttaaaaaattaagtataatttaatttaataaaatatatggatttgaggtgcacagttttgtagattctgatacactgaatacccctgtgttttcaaaaacctcagtcaagatataaaacattaccatcactcagagtaggcctctttctaaacaaccccatcctcctaaattaaaatcactgatctgacttctgtcactaaagtatattttttatagttacttggtgctgtatttttttcaactttttgaagtaatttcaaatgtacagaaaagtcacaaaaatagagaataacttttatgtatgttttacctagagtcacatatttttaacattttgccacatttactttattattctctctctctacacaaacaacatacacatatatacacctatgcttgcattcatgtttttataaaccatttgagagtaggttgcatacattatgctcctttaatctgcgaaactggctgctctgcctatggagtagccattcttttactcctttactttcctaataaacttgctttaaaaataagaataatatgcaatactataatatagtatgtgttttttaaaaataaagacattctcttatatagacacagcacagttaccaaatttaataatttaactttttatttttttttattcttagttttgtttttttagaaacatgatctcactctgtcacgtaggctggagtgcaatggcacaatcatagctcactgtaacctcgtattcacagccctaagtgatcctctgacctcaccctcccaagttgctagtattacaggtgcacaccactgtgcccagtgtatttttttatagagacagagttctgctatgttgtacaggctgctattgaactcctggccccatatgatcttcctgctttggcctcccaaagtgctaggattacaggcatgagccattgcacatggctggaatttaactattatacaatactttaatatattttgtcagttgtcccaatgctgtcttttatagcatgttttttgttcaatatgaaaatctaatccaggatcacttactgcatttaatgatatctttttgtttcctttaatgtgggacacttccttaccctttcatgacactggcctcaacttatttttataatgtttcatcacagtgagatttagattatgcaatctttcctgcatcagtacatagtgagattgaggtcatattcttctcagggtattattttgagcctcttagccccaaggccaagttcctggccaaagtttggtccagtttcactgtatagttactatttttgcttctcacagttgtttagtatgtaacaattaacatgagatattatgaccgtgcaaatatgctgctccttctctgattttccctctcttggatttagcatacatagatgattcctgttcaaatcaaattttgtcatgatggctgtaaaatgatttattaattggcattttattgtaaagaagagccccccttctgctcctttcctctcctctcctttccttcctttctttctttcctttattttccttccttccttccttcttttttcttttcttttttttttttttttgagacggagtcttgctctgtcacccaggctggagtgcagtggcgcratctcagctcactgcaagctccgcctctcgggttcatgccattctcctgatacaggcgtgagccaccgcgccctccctccctccctccctccctcccttccttccttccttccttccttccttccctctctccctcccttcctccctccctccctcctttctatttctatccatccattcatcttcccatccatccatccttcagatggactcatgaatttcttactgtatggtatcttagttttctctgttttggaacatgctacaaacagaatcatgcagtttatgtggatcttctctcactcaatataatgttttagcaatttcatctatgttgttttacctctgaatatgtcacaattattttgttcatttacttggtgatggacatttgggttggctctggtttagagctcttatgaataaagatagtcttaacattcttagatgagtccatctatggacatgttttcagttctcttgttagctctttgggtggagtgtgctttaactttatttaaaaactgtccaactttttcccatctgtcaacaatatatgagagttctagatgatccacatctctgtcaacatttgatgttgttagccttttttattttaggcattcaaaatgaatgactattcgagatgtagcttattatgttttactttgtactttctgaataatattgaacatgtttccctgaacttacagatcatccttatatagttatatatgttatatacaacatataatagatacattgtaaagtactgaaatgttttgcccttgttttaattgggttgcctttttattatttattggaagttctttttatattctagatataagacttttgccagatatgtatcttgtgaatattttccctagtctgtagcctccttttgattttccttgtagtatagtattctaatgaacagaaaattttaactttaataaaattaacttcatcaagttttccttttatagttagtgctttttatatttgaacaagtcatttcctacctgaagattacaaaatcgtcttctgttttcttcgggaagctttatagttttcctttttctatttatatatatatatatatatatatatatatatatatatatatatatatatatatttggtatcatctcaatttttaaatacggggtgaggtaggagttctaggttctgttttccttcataccaatatctagttatttcagcaccatttgtagaaaaatctatcattcccataaattaccttggcactttagtgaaaaattgattgaccacatatgtctaaatctatttcctgtttgtttccttttgccactggatccctttttctattgtcacccttcttccattttcatttaatctccagctttcttaggctgaagctttatttaggactcttatttccactatctatttcttttaggtctagggccttattcttgttgctctgcatggttcttcagtcctaaggttctttgttggtggcttctgtagacaccttcartgtagcatgtgtttttatcactcatcactgtatgtttgactttctctttgtaaattttcattgaacattgtaaattacctttactttttcttcagactggtgctacattttaaaagataatgttttacctaatttagcatttctaggtgtttgcaaaaggagggatttttagaatatctaaaacaccatagtactgggagcagacaccttacagttaagtcttcattcattctggattatactctttatcattataaaatttctttattataaaatcacttagttctttcctttcgtcctctgaatgtgatctgtaattagtatcccaacaactatttcattctgtccatgctttcctagcatgcctttaaccatctttttattttcaacgtttttgaaacctttagataaatttttatgttacaaggttaggtttcactttgttactcagtttgtcttttctcttaagtaacagtgttaaactcactttcattcattgatattagagttatatttagtctttatgcaattatcatagtatttgttatggtttctgttgcctaaaaatatgttattatatgatcattctatgatccactaaatatgtcattatataatccatgttttcctgttttcgtttagtataaaccattagtaatttaaaggtttggtttggaatccactggttatctttataactaatgttttgtgtaatatactctgttctctattttattacgtattgttttcttattcccagttatatgcagtgacattggtatattgcctttttctccctctctgtcctttctgagcacgatatcaattggttatttttttgatgttcacctttgtatctttaataatacttacacttttcatttataaaaatactcatgtggctgggcgtggtggctcacacctgtaatcccagcgctttgtgaggctgaggcgggcagatcacaaggtcaggagatcaagaccatcctggctaacacagtgaaaccccatctctaccaaaaatacaaaaaaaattagctgggcctggtggcatgcacctgtaatcccagctacctgggacactgaggcaggggaattgcttgaaccagggaggtggaggttgcagtgagctgagattgcgccactgcactccagcctgggcaacagagtgagactatatctcaaaaaaaaaaatacaaaaaattagccaggcatagtggcacattactgtaatcccagctactcgggaggctgaggcaggagaatcgcataaacccgggaggtggaggttgcagtgagccaagattgtgccgctgcattccagcctgggtgatagagcaagactgtctcaaaaaaaataaattaatttaaaaaaatacttaacattatttctttaccaactttaaactttgcctttgtttcccttttaccttctgttaggtatgtaatttctgtgttgtgattatctataacttatgttctcatctgtaaaccagattatttaaatagttaagtattatttaaatagtgaagtattttcattgcttccctcggtcccttttgtttctgtacggtgtcctttggttgaagttattttgaaatgtacaatagattaacgctaactgtagtcaccctactgatctaccaaacgttaggtattatttcttctatctaactgtatatttgtacccattaatcaacctcttcatcctcccctccccactacccttcccaaccactagtagccamtaaggtactctgtacctttgtgagattcactttttgagctcccacatatgagtgcgaacatgtgatatttgtctttctgkgcttggcttatttcacttaacatcatgacctccagttccatccatgttgctgcagatgagaggattttattcttgtttatggctgaataatattcattgtgtatatatatatcacattttctttttccatttatctactcgtgggcatttaagttgattacacattttggctattgagtacattgctacagtaaacataagagtgcagatatctcttgatttctcttcttttggatatatacccagtagtggaattgctggatcattggtatttctatttttagtttcttgaggaatctccatattggtttccatggcagctgtactgatttacattcctaccaacagtgtgcaaggattcctctttctctactaacatcccttattcccattttttttgataaaagcaattttaactggggtgagatgatatctcattgtggttttgatttgcatttctctgatgattagtgatgtggagcatttttaatatacctgttggcagtttayatatcttccttgagaattgtctgttgagatcttttgtccattttttaattggaatatttctctttttttgctatagagttttcttatatattctggctattaatttctcatcagatagacattttgtaaatattttctctcgtattctaaaaatatcctttcactcactttataattacacatctgtggggtaagaaattcctcaggcccactttatttcctggctgattttgtaggcagtgctcactgtttgctacagactagtctgaggactcactggatttttttctacttagaagtgatcaattttttacctcactacccattttttgcagtccagtactagaatatgtcttggcattgacctttgtgtttctctttttcttggacgtgccatattcttttagtttctagtttacatttttcttctacttctggaaacttctcttgaattacactgagagcagttttttacttttttcattttggcttgcttctttgaagacatcaaatatgcttatatttgttgatttgtcttggcctatttatatcacttgtttttttctcttttgcattcttaatttatttttttctccaaaacccttttttttgtttaaattctttttgaaaatttccttttcaatcctatcctgtgtgtactttcctattttagtagtacctgttctctcttctgcttccatttggccttcatttcagttttgtttatttatgtattttttttatttctctgacctgtaagttcacattttatttcttcatctttttgaccatagctcccctgagctcctgcatctcctctttatgttttctgtgttatagaggtgattgcttctttaagtttatatttgtggcaacatatttgactaattttctttttttaattttattttattattattatactttaagttttagggtacatgtgcacaatgtgcaggttagttacatatgtatacatgtgccatgctggtgtgctgcacccattaactcatcatttagcattaggtatatctcctaatgctatccctcccccctccccccaccccacaacagtcccgagtgtgatgttccccttcctgtgtccgtgtgttctcattgttcagttcccacctatgagtgagaacatatttgactataattttcatctgcttcataactgtttttcttatgtgtttccatttgattttcctttttctttccttcattttatttgtagattccttttttaagaatgactgctcatcattcaatgagaaacattttttcctgatcatactgtttgcaaaaggtcatcttgcaaacagtatgggctagagcaatgttatagactaacacctattctccttatgacactgtttttgtgtgtaattgatttcttttgatatgacactatttttgtatgtaattgatttcttttgattatatagcatactttgttttattatgctatatagtataatcagatatagtatgctatatagtataataaaacatatatgctatatagtataatcaaatatggtatgctatatttgattatatagcatagtttgttttattataatttgctttattgtgctttgcatatattgtggtttttacaaattgtgctttgcatatattgtgcctttcatatatgtggtgtttacaaattgtgctttgtatatattgtgctttgcatatatgtggtttttacaaattgtgctttgcatatattgtgctttgcataaattgtggtttttacaaattgtgctttgcatatattgtggtttttacaaattatgctatayagtatattcaaatatagtatgctatatagtataatcaaatatatatgctatacagtataatcaaatatagtatgctatatttgattatatagcatactttgttttattataatttgctttattgtgctttgcatatattgtggtttttacaagttgaaggtttgtggtattcctgcattaagcatgtcttttagaaccatttttccaacagtatgtgttaagtttgtgtctctgtgtcatattttagtaattctcaatatttcaaactatttcattatccgttatggtgatcagtaattagtgatctttgagtttactattataattgttttggggtaccatgaatgataccaattcatataagatggtgaacctaatggataaatattatgtgtgttctaactgctccacygactggctcttcctctctttccctctccacaggcctctgtattccctaagacaaaacaatattgaaattaggtcagttaataaccctacagtgggctgtaagtgttcaagtagaaggaaagatcatacatctctcactttaaatcaaaagctagaaatgatcatgcttagtgaggaaggcaggtcgaagtggatataggctaaaagctaggcctcctgtgccagacagttagcccaagttgtggattgcaaaggaaaagttcttgagggaaattaaatgtactcctccagtatacaaatgagagataagaaagcaaaacagtcttattgcagatgtggagaaagtttcagtggtgtggatagagtatcaaaccagtcacaacattcccgtataccaaagcctaattccagagcaaggccctaattcttttcagttttatgaaggctgagaggtgagaaacctgcagaagaaaaatttgaagctaaagaggttggttcatgaggattaaggaaaaacgccatcgtcataacataaatgtgcaaggtgaagcagcaggtgctgatgtagaagctgcagcaggttactcagaagatctagctaagatcattgataaaagtgactacactaaacaacagattttgaatgtagatgaaacaggcttctattggatgaaaataccatctaaaactttcataattagagagaagtcaatgcctggcttaaaaacttcaaaagataggttttcttgttaggggctagtgcagctggtgactttaaggtgaagccagtgctcattgaccatctgaatatcctagagcctttcagatttatcctaaatctactctgcctgtgttctataagtagaataacaaagcctggatgacagtacatctctttgtagcaaggtttactgaatattttaagcctaccattgagacctactgctgagaaaaaagattcctttcaaaatattattgctcattgacaatggacctggtcacccaagagctctattgtagatatacaagatgaatgttgttttcgtgcctggtaacacagcatccattctgtagcccatgtatccaggagtaattttgactttcaggtcttaatatttaagaaatacattttgtaaggctgtagttgccaaagataatgattcctctgatggaactgggcagactaaattttaaaccttctggaaaggattattctagatgccattaaggacattcatgattcatgggaggaggttaaaatgtcaaatcaataggaatttggaagaagttgatcccagtcctcatggattacttgcaggggttcaagacttcagtagaggggaccgggtgcagtggctcatgcctgtaatcccagcaatttgggaggccaagcgggtggatcacctgaggtcaggagtttgagaccagcctagtcaacatggcaaaatcccatctctactgaaaatacaaaaattagccaggcatgctggcaaccacctgtaatcccagctactcagaaggctgaggcaggagaattgcctgaacctgggagyggaggttgcagtgagctgagatcacaccactgcacttcaacctatgcaacagagcaagactcctcttatattgaaaaaaaaaaaaaagacttcagtggagaaagtaactgcagatgtggtggaaatagcaagagaattagaagtagagcctgaagatgtgactgaattgttgcaatcttgcattaaaacttgaacgatgaggagttgcttcttatggatgagcaaagaaagcagtttcttgagatggaatctattcttggtgaagatgctgtgagcaatgttgaagtgacaacaaaaaattaagaataaaacgtatactgagttgatacagcatcagcaggttggagagtattgatttcaattttgaaagaacttctactgttactaaaatgctttcaaacagcagtgtatgcttcaagaaatctttcatgaaagaaagagtcaattgatgtggcataagtcattgttgccttattttcaagaaattgccacagccgtcacacccttcagcaaccaccaccttgattagtcagcagccatcaacaatcgtcgaggtaaaacccttcactctccatatttatgtctggatatgtgtatttgtgaatatacatggttaataataattgatatatgtattaatacatgaaatttttagtatactgttgaacaagaatgtttcctatttgtcatttacttattcatgtctgaggagatataagaagaaaatgtaatccaaaaagattacaactctctaaacgatcacatgttcattacccttttttagcaatgttttacaactaggatatgtacattgttttagacataatgctattgcatacttaataggctacattatggtgtaaacagagctttaatatacactgtgaaacaagtctgtgtgactcacctttttacgacattagctttgttgacgtgatctggaacggaacccgcaatatctccaaggtatgcctgtatcattctgacagtattgtgaccaactataaagattaaatgccatgtttatgacagcaccctgcacagtgcctctaggggagcagacactgtaaatggtgactgctataataattattgtaataatctatctcattctgggctgaactcacaaaatcttggaggtatgcctgtatcttctgaatcaaaagaaagatggctagcagggcaaagtctctcatacatgcccctgccttaatatgactacttcctacattcagcatttgtcgttgagccttgcctgcttctcttctcctgcacccagactggcccctgggatagacagtgtacatatcatcgtgtgttgctgtaaagaagggattcttgactttgcaacacagctattcctcctactttggaactgtgtttggctgttatgttatgttatgttatgttatgttwtgttttgttttgttttgttttgttttgttttgttttgtttgttttgttttgtttctctgagatgtatagcctgaagtgttctttctargtatactccctcagttattggggttttaaaaatatatttatttttatttattcatatttctttgagacagtctcactctgttgcccaggctggagtgcagtggcgcattcttggctcactgcaacctctgcctcccaggttcaagtgatcctcccacctctacctcccgagtagctgggactacaggtgcccaccatctcacctggctaatttttttgtatttttagtagaggcggggtttcactgtattgaccaggctgatctccaactcctgacctcaagtgatctgcccactttggcctcccaaagtgctgggattacaggtgtgagccactgtaatatttaaaatatttattaaatattttaattaattttattttattaatatttattaaatatttaaaaaccaagacaggtttttgaaatatttaatacttttggtaacctatctttttgttttgccatttgagatttttagatttctcccaattttttcatagatattaaaaaaccatgcattaaatctttgaatctctgctccatcaagcttagtgttagatacattgcctaattttttattaattcatatttatgtcatgtatttatttctggatatgtatattgtgaatatacatggttaaaaataattgacaatgtaataatacatgaaatttatagtatacagttgaacaagaacatttgctatttgtcatgtacttattcattcaggagatgtaagaagcttgtgattgaatgaaattattaggcttagcattgtacattttcttttttacctttttcattagttcatactctttgtatggctattgttctgacataaagtgaattttattttttctggaaatcctggcagagtaatttgttttaattgtctgtctggggaagaaaagactttgtagaaagtcaacaaggatacccaggaattgaacacagctctgcacgaagcggacctaatagacatctacagagctctccaccccaaatcaacaaaatatacatttttttcagcaccacaccacacctattccaaaattgaccacatacttggaagtaaagctcttctcagcaaatgtaaaagaacagaaattataacaaactctctctcagaccacagtgcaatcaaactagaactcaggattaagaatctcactcaaaaccgctcaactacatggaaactgaacaacctgctcctgaatgactactgggtacataacaaaatgaaggcagaaataaagatattctttgaaaccaacgacaacaaagacacaacacaccagaatctctgggacgcattcaaagcagtgtgtagagggaaatttatagcactaaatgcccacaagagaaagcgggaaagatccaaaattgacaccctaacatcacaattaaaagaactagaaaagcaagagcaaacacattcaaaagctagcagaaggcaagaaatattaaaatcagagcagaactgaaggaaatagagacacaaaaacccttcaaaaaattaatgaatccaggagctggttttttgaaaggatcaacaaaattgatagaccactagcaatactaataaaaaaagagagaagaatcaaatagacgcaataaaaaatgataaaggggatatcaccactgatcccacagaaatacaaactaccatcagagaatactacaaacacctctacgcaaataaactagaaaatctagaagaaatgkataaattcctcgacaaatacactctcccaagactagaccaggaagaagttgaatctctgaatagactaataacaggatctgaaattgtggcaataatcaatagcttaccaaccaaaaagagtccaggaccagatgtattcacagccgaattctaccagaggtacaaggaggagctggtaccattccttctgaaactattccaatcaatagaaaaagagggaatcctccctaactcattttatgaggccagcatcattctgataccaaagctgggcagagacacagccaaaaaagagaattttagaccaatatccttgatgaacattgatgcaaaaatcctcaataaaatattggcaaaccgaatccagcagcacatcaaaaagcttatccaccatgatcaagtgggcttcatccctgggatgcaaggctggttcaatatatgcaaatcaataaatgtaatccagcatataaacagagccaaagacaaaaaccacatgattatctcaatagatgcagaaaaagcctttgacaaaattcaacaacccttcatgctgaaaactctcaataaattaggtactgatggaacgtatttcaaaataataagagctatctatgacaaacccactgccagtatcatactgaatgggcaaaaactggaagcattccctttgaaaactggcacaagacagggatgccctctctcaccattcctattcaacatagtgttggaagttctggccagggcaatgaggcaggagaaggaaataaagggcattcaattaggaaaagaggaagtcaaattgtccctgtttgcagatgacatgattgtatatctagaaaaccccattgtctcagcccaaaatctccttaagctgataagcaacttcagcaaagtctcaggatacaaaatcaatgtacaaaaatcacaagcattcttatacaccatcaacagacaaacagagagccaaatcatgagtgaactcccattcacaattgcttcaaagagaataaaatacctaggaatccaacttacaagggatgtgaaggacctcttcaaggagaactacaaaccactgctcaacgaaataaaagaggatacaaacaaatggaagaacattccatgctcatgggtaggaagaatcaatatcgtgaaaatcgccatactgcccaaggtaatttacagattcaatgccatccccatcaagctaccaatgcctttcttcacagaattggaaaaaactactttaaagttcatatggaaccaaaaaagagcccgcatcgccaagtcaatcctaagccaaaagaacaaagctggaggcatcacacgacctgacttcaaactatactacaaggctacagtaaccaaaacagcatggtcctggtaccaaaacagagatatagatcaatggaacagaacagagccctcagaaataacgccgcatatctacaactatctgatctttgacaaacctgagaaaaacaagcaatggggaaaggattccctatttaataaatggtgctgggaaaactagctagccatatgtagaaagctgaaactggatcccttccttacaccttatacaaaaatcagttcaagatggattaaagacttaaacgttatacctaaaaccataaaaaccctagaagaaaacctaggcattaccattcaggacataggcatgggcaaggacttcatgtctaaaacaccaaaagcaatggcaacaaaagccaaaattgacaaatgggatctaattaaactaaagagcttctgcacagcaaaagaaactaccatcagagtgaacaggcaacctacaaaatgggagaaaattttcgcaacttactcatgtgacaaagggctaatatacagaatctacaatgaactcaaacaaatttacaagaaaaaaacaaacagccccatcaaaaagtgggcaaaggatatgaacagacacttctcaaaagaagacatttatgtagccaaaaaacacatgaaaaaatgctcatcatcactggccatcagagaaatgcaaatcaaaaccacaatgagataccatctcacaccagttagaatggcaatcattaaaaagtcaggaaacaacaggtgctggagaggatgtggagaaataggaacacttttacactgttggtgggactgtaaactagttcatccattgtggaagtcagtgtggcgattcctcagggatctagaactggaaataccatttgacccagccatcccattactgggtatatacccaaaggactataaatcatgctgctataaagacacatgctcacgtatgtttattgcggcattattcacaataacaaagacttggaaccaacctaaatgtccaacaatgatagactggattaagaaaatgtggcacatatacaccatggaatactatgcagccataaaaaatgatgagttcatgtcctttgtagggacatggatgaaattggaaatcatcattctcagtaaactatcacaagaacaaaaaaccaaacaccgcatattctcactcataggtgggaattgaacaatgagatcacatggacacaggaaggggaatatcacactctggggactgttgtsgggtggggggaggggkgagggatagcactgggagatatacctaatgctagatgacgagttagtgggtgcagcacaacagcatggcacatgtatacatatgtaactaacctgcacaatgtgcacatgtaccctaaaacttaaagtataataataataataataaaagattaaaaaaaacctttgtagtatttaaggcttttgcaaaaaggataagagaagatttcatagtaatttttattctttaaaagtatcacttgatgacaacctaatttctttcattgttttgttttctctcctaaaattgaaaagttttctgttacattacccatttaggtgtgctgtttttgttgtyttataatccttattatttggctgactagattgaatttttgcatcagtgaacaaacattttcttcaaaaaatacctggtggttttactataagaagattctttgttaaattatttcaagggcatgaatttccatgcttatcatctcagcctaacagggtaagggtaattaagtgaaagtatgaggccaagcgctgtggctcacgcctgtaatcccagcactttgggaggctgaggcgggcaggtcacagggtcaggagatcgagaccttcctggctaacacagtgaaaccccatctctactaaaaatacaaaaaaaaaaaaaaattagcctgacatggtggcgggcgcctgtagtcccagctaccttggaggctgagccaggagaatggcgtgaacccaggaggcggagcttgcagtgagctgagatggcaccactgcactccagcctgggtgacagagcatccgtctcaaaaaaaaaaagaaaatatgaattaatcgtaagtataggtataaaaaaccaaaagagataagttacaaaaatttgctaattaattgcatactgcctgattcatctaatttatgagaaaccgtatcttggcattctgaatagtattaatttgatttgtagaatagcatcatagttgtgtcccctcttcaagcagggtgggtcccataagagtgtctatagagagacttggctctccgtgtctgaaagtgttatgtatgcgtgtatcaataggtgtccttttttgtttttttttgagatagtctcgctctgtcacccaggctggagtgcagtggcacaatctcggctcactgcaacctccgcctcctggattcaagcgattctctcgcctcagccttccaagtagcttgattctcccgcctcagccttccgagtagctggggttacaggcacccgccatcatgtctggctaatttttgtatttttgtagagatgggggtttcaccatgttggccaggctggtcttgaactcctgacatcaggtaatctgcctgcctcagcctcccagagtgctgggattacaggcatgagccaccgtgcctggccaataggtgtactttttaaataggtgaacttaactgctgttttcattgtagataaacctactttatcagactttttatctgaaagtacccttctacgattctctagcctgtgaatttcggaataaaattaagttgcgttggtgaacatatgtattaatttctgttggagatatgcatatataagaacaaaattggaatgccactacatacatatccaccagaatgactgcattaaaaaaaaaaaagacaataccagcaaggatgtgaaacagtgttaactgtcttatactatygttagaaggggaaattggcacaactactttggaaaactgtttggcagtgtctacgtatgtgtgttctgagagctagtaatccttcctgtaggtatatcagtatatataacatatataagtatgtatacacatatgtttacatatatacatatagaacataaaatatacatatatacatataacaggtatacataaacatgtattaagtacatataaacatatataacacatatatgtttatatatataaaacaaaagaatagcagtcctattcataatagttaggaatagcagccttattcataatagttaacttcagctgtctatccactctgtaatgggagataatcatggtatattcacatagtggaaaacttaaaacaatgagaatgaacaaatttatcactaccataacaaccggatgaatttttcaaacatagtgttgagtgaaagaaaccagccataaaagacatatattaattgtacatacatacattaagtgtatatgtccatttacataagagttatataagatactaatttatgtataaccacttacgtgaaatataaataacatattaatctatggtgttcagtgtcagtcagtggccagcatagcattcagtggaggtggcggtgttgtgaaaggatgggccacaagagaggcttcgggggggtgctgataatattctgtttctttaacttggtgctatttacattggtatgctctttttatgaaaatttttgaattttcttaagccatatacttgagatttacataatttctgtgtttttaatacttcagtaacaagtttaccaaaactattacatgtactttgcttttcattatatatacatacaatgtatatatgtatatttatagacgtgtgtatgtatatatatatttttaagcatagacactatcgaaatagttctattttaggtaatttatcaaaaagaaaaattctaataagcaataaaaaattgggtgtgtttgttttgtgtttgtatatgtgtgtgtgtttccagactgaactgttaacactcttttttcttttctttttttgttttttgagacagggtctcattctgtcactcagattggagtgtggtggcatgatcatggctcaatgcaaccttcacctctagggctcaaacagtcctccttccacctcagcctcctgagttgtaaccacaggcatataccatcatacctggctaataattttttgtaggcatggagtctcactgtgttgcccaggctggtctccaactcctgggcttaagcagtcctccagccttggcctcccaaagggctgagattacttacctgagccaccacacctggcctactgtattttcttatgctacttcattagtcagttcaagcaaaaaatagaaatttactcagatgattcaacttaaaagatcttagtggaaagctgtttcagaggtctaaggttaagagagccaacagttagtttcagttaccaaaaaccggcaatagatagcagccagtcatgaccattcctaggcctgagagaacaagtatagcccagtgggccttggaggtaaggaagaggggccgcaggcaggatccagctactaccagaccttcctctaccattccttcttcctgttgtataacctccattgatcaaactccattagaagctggttgtcaagggagtattctgtaggagagagcaaatggagaataatcagcataactaagactttggaaaactccagagaattagtatagactatgactgttttcccctctaatcatcgcttgcctttgaagttctattttgggtaattttcatattacatatgcatatccatccttctttctccctctttctggttatgtgtatgtatatttacacataacagagaaaaagacatactatacttcaacagcaagtaaaatgaaaattaaacactaaatttaaaatcactaattaaaaagtgatgatgtataagcaaatatgataagagtttaaaacagtaaaatatgttattagaaatatagagaaggtaggcatggtcgcttatgtctgtaatcccagcactttgggaggccaaggttggaggatagcttgagcccaggaatttgagaccagtctgggcaacatagtgaggtcctgtgtctataaaaaatttcttttaaataaaaattaaaaattagccaggcatggtggcacatgcctataatcccaacctacttgagaggttgatgtggaaggatctcatgagcctgggaggtcaaggctgtagtgagccatgatcatgccactgccctccagcctgggagacagagtgagacccagtgtgaaaaaaagaaaagaaaaaaaaaaaaaaaaaggaaaagaaatatggagagctcaatatttgttggattttctggttttctctcaactgaggtttgtaacttaattacctagtgtttagtaccattaagaaaatgtacaaagtacagtactgccttttgttttatctaaacatttttattataggaattttcaagtgtatatagaagtacagagaagagtataagaaccccttgtgtggttatcacccaactttaataattatgaacattttgctagttattgattgttctgtttcctgtcccttatctacagacatacttttctttccctggaatgtttaaaagtaaatttaagaaattatattttacccataaatacttctgtcattttaatctctaacaaataagaaactttctcatacatacaatgttatttatcacagctatcaaaatttaattgctgaatatatctaatatttggtacatattaaaatgtccccacttatttcaaaagtgttttcatgccgtttgtttattcatatgaagatccatataagctccatacattgagtttagttgactctttaacttttattagatcagcaagctcactaaacattttaattttttttcttttttttcttttgagatggagtcttgttctgttgtccaggctggagtacagtggtgcaatcttggctcactgcaacctccgcctcccgggttcaaacgattctcttgcctcagcctcccgagtaagtgggattacaggcacctgtcaccatgcctggctaattttggtatttttagtagagactgggttttaccatgttggccaggatggtcttgaacttgtgacctcaggtgatcctcccacctcagcctcccaaagtgctgggattacaggtgtgagccactgcacccagccaaaattttaatatttttatttgccttattagccactttaattttttctttggttaatttaaatatcctttggcactgtgtatgtttttgtgaatccccaaaataacctaatgaaataactttaaaacttggcctttctggaaagtatctgtgtagtgcttagcattgttttaagtacttaataacactgggatagcacaaaagaagcatgagctttagccaaagctggctttaggttctgttcattccatccatgtcaagagtatgcccatgccaccattatgatcatgggtatactcttaaaactctatgaaattgagcatgacaacatgatgcccagttcaaaagatatagtcaagaagctttagatttaattattgtgagttagttatttacatatttatgaatagatgaatcatctctgcaaactgaggctttcaaaatgactgcagacagagaagtggatggagggcaggaagaggttcctctctagcagtgaagacataaatgggaccccaatgttaagtgaatgcttcatgtgtaagtacagactgtgtaagaaagggttttttctattcagaaactagaaattggggaatagttacaaaatacagaagaatgtgttacatttctaacaataaaactggctactgggtaagtgaatggttgatcccattgttaggcatcaacaaatgaggaaaccaacaaatgaagtgcaaggtagaacagcccttttgtctgcagaacaagcatgccatggttcttaccagttcatgaaggcagaggcagatggcyagtatcatcctgaaagtcagtgtgtgaatgggagtgcaagggtggtgtgtttttggattaaggtaatgcccttttgagttgcatctcaattctcggtttatgatacctcactggtatgtataaaacctttctttcccctaccttagaagaaataactttgaacacctagatattgaactttcagcttatcatagtaactgtactatatttaaaccgaactataggtattctcgaaaatatttcattatccatccttgcattagtccttgtagtattgctataaatgaatatctgatgctgggtaatttataaagaaaataagtttatttggctctggttctgcaggctgtactagcatgataccagcatctacttggctactggtgagacctcacaaagcttttactcatggtggaaggttaggagcaggcatgtcatatggtgagagagggagcaagagagagaggaggcrccagcttcttttgaatgatcagatttcatggtaactaaacgtgtgagaactcacttctaactgtggggagggcaccacacccccatgagccagattcctcccacgataccctacctccaccattggggatcacattttaataagaaatttcgaggggacaaacatccaaattatatcaatcccttgaaagaggaaatttaagtaaggctagagtcgggttgagtcaaacatggcagaatccaatgaatttatattatttactaaaaatgaactggaactaattgttggttttagcattctagattagtcttttggttttttgtcagtttgtttgtttttgagatggggtcctgatctgtctcccaggccagagtgcaggggtgctatcatggttcactgcaacctctggtttccaggctcatgtgatcctcccgcctcagcctcccaagtagctgagactagagacgcaagccaccacaccctgctatttttcgtatttttgtttttggtagagacagggtttcactgtgttgcacaggctggtctcaaactcctgagatcaattgatctgcctgcttcagcctcccaaagtgctggaattacaagcatgagcctctgtgtgtgtcctacattagtttttrtaagtgtgtctatcaggcaaggtaagtttcttctataaaaagtgatatttttatattgggtaggatggaagctttgcagctgagaaagtgacttctgccctgggccacactgccacctgggggtctaaaagaaagatggccattgtgtcatagccagaaatctttgacaatgaccttggttctatttaagacaaatacgaagacaccattatctattcataggcaccagaataattctgtgggcttacttaatgatgtggaatgatacactattatgaaaacacattttaaaatcgaatgtgtatttccatattcttttcctttccatctttttttttttttagcatattactagctatcttgagacaaaggcaatgtacattacctgagtcctttcatatgtatactgctacttagtacttataaagcattatgtgggcaatggtagtagttttccagttatgccataaaattggttagtatatcaatgtccttttcccagctcaaattctttgatcataaaaatagatttttgtggtgttggtatgtttgcatatgtttattttaggtctttttggtagatgagttgctgttaccattggattatttgatcctttagatataactgaaggacaaatattatatgatttcatttacatgaggtacctagaatattcaagttcatagaaacagaaaatggaaggtggctaccagagtttatggagaagggacatcatgagaattatcatttaatgggtagagttttagtttgggatgataaagttcaggagatggatagttgtgaaggttgcacaacaaagtgaatgtacttaatgccatttgactgtatatttaaaatgcttatagtacagctgtactagtaatattgaatggtccactttcttagggtataggaatgaatatgaaagtgaatttgattttcaaaagcacatattatatgctagaagtgttacatatataaggctacaaccctacgatgtataaacttactactagctctcctttacctgtaaatgaaccacattgagcttaaagtggttcatttatacaaatttattaacagcctcctgtttgttcaactctcaatgtaatttgtctgaggtataagactkataagccaataacagaggtggctgatatttcaacctatttttgctttactctttctgttccaccactctgccttccatgagaatattgcagattcttgttatgatgaaatatggacaatggcattctgttataccatagattctgacatgtcataatgcaagactgggggaaaaaagtcaaatagtgacaatgcaagcatcccaaaataatcccaagcttgtgaacatctgtgagtttttttttttttttttttttttgagaccgagtctcgctgtcacccaggctggagtgcagtagctcgatctcagctcactgcaagctccgcctcccgggttcacgccattctcctgcctcagcctccccagcagctgggactacaggcacatgccgccatgcccagctatatttttgtatttttagtagagacagggtttcaccgtgttagccaggatggtctcgatctcctgaccttgtgatctgcctgcctcggcctcccaaagtgctgggattataggcatgagccaccgtgcccggccacatctgtgagttttaaacaggtcatatctaatttgaatacactataagatagaaattattcatatactatgaggttatctatgmcagtatkttttgttttaaattagtttcccatcagatataaagttggtgcttttctttataatgccatgagcctctcaagtctctcagggaagaatttcattcttayatttatttgctgtttcactttgcattccttcctttctattttgctttcttcctttgggagccttcatccttccagtgaaagaagactgaagttgtctcttcatgataaataattcaatggaaaatgtcagaatataataatttccaaagactagtcatgkaatgactgatttttggtaatgctaaaggcaaaataactttagcctataccataaaaaagatctagatattccctttgtatttgtggtaacttgattttaggtataccctttccattacccttcagaaatggaatgtttgatgtactatcgagaaaactgaatcaattctgcatttcgtgaaccctgttacttatctttagtagccatggaaataattccccagtaaatatatagttgcaaaatcactgcctarttacctttctttacatacaaaatgactaatatttgataaaatatgaagtttttaaaaatagttacgatattttgttacagtgaagcaatttatatrttttcttaacatctccccaaaactctgaaacacagtgaatgcttctttggaagccaaggagcttgttgctgacatagtaataatttggttgtttgcacattttataaaatactaaaatgttgcaagttaccatattccttaaataacttatggtaagatsttattgctgaagtgttggcttgtgtgtaggagggaaattatrtgttacagtgttatataaaactgactcatatgagtaggtgaaagatcccaagaataccaggacacccacactagaaaaagccaatatgtacactttctctttacactatgttctagcaggctgcttaatggaactctatattcattaaagaaatttctgtaatttctttcattgccttggtggatatctttctggttgaaaaaaaaaaaaaagtgaggccgggtgcagtggctcaaccctgtaatcccagcactttgggagaccaaggtgggcggatcacaaggtcaagagattgagaccatgctggctaacacggtgaaaccccgtctctattaaaaatataaaaaattagctgggcgtggtggcgggcgcctgtagtcccagctactcaggaggctgaggtaggagaatgctgtgaacccaggaggcagagcttgcagtgagtcgagattgcgccactgcactccagcctgggcgacagagtgagactccatctcaaaaaaaaaaaaaaagaaagaaatttcgtgatcattaaaaaaattattttctgtaggatgaaaaagcttgactccgtatttgaagtaattaacttctccgtgcttcagtttttgttctgttttgatttgttttgagatggagtctcaatctgtcacccagactggagtgcagtggcgtgatcttggatcacttcaacctccgcctcccgaattcaagcaatcctcctgcctcagcctcccgagtatctgggattacaggcgcctgccaccactcccagctaatttttgtattttttagtagagatgggatttcactatattggtcaggctaatctcaaactcctgacttcaggtgatccacctgcctcggcctcccaaagtactgggattacaggcgtgagccaccgctcctggcctgcttcagttttttaattagttaagatcaaaataataaaacatacctacttttagagtattttagaatttttttttttttgagacagagtctcactctgtcacccaggttggagtgcagtggctcaatctcggctcactgcagcttcgtctcctgggttcaaccgattctcctgccacagccttctgagtagttgggattataggtgcccaccaccacgcctggctaatttttgtatttttagtagagatggggtttcgccatgtttgtgaggctggtcttaaactcctgacctcaggtgatctgcctgcctcagtctcccaaagtgctgggattacaggcgtgaatcaccgtgcccaacctagaatatttctttcyttttttttttttttgaggtaagagtctcgctctgtcacccaggctggagtgcagtggtgtgatctcagctcactgcaagctccacctcccgggttcacgccattcccctgcctcagcctcccgagtagctgggactacaggcgcccgccaccacgcccgctaattttttgtattttttagtagagatggggtttcaccgtgttatccaggatggtctcgatctcctgacctcatgatccacctgcctcagcctcccaaagtgctgggaatccaggcgtgagccaccgtgcccggcccaaatatccttaactgtatttattatattatccaaaatattgtttggttgaatatcccaagttagattttgtttgtatggagaattttttgttggcgtttgtttgtccacctccagtacaaaaagaaatctaacaaactttcaaggaagtttgtcccggttctcaaaatgggatgctattcaaactgaattaattctattatacattagtatggttatattttccagatttaaaaaatgaatttaaatttattaattatgttcttaactgataatgattaaaataaccctccttgtgatagttatttgtattagaatttccatacttgatcatgtaactaaagctgtgatcaaataattaatgttatttttacaaactgtttatttgttttagtaaagaggactcatgaaagaattttaagtaaatccaaatttctaggatgtatatgtttatcacatatatgtgtgtgtgtgtgtgtgtgtgtgtctgcatgcatgttggtgtgtgtatcagattaaattttaattaagatgtgttgaacacttagaaaaatattgatttgtaaatctttctgaaccttttcttagtcagtggaaacttaatttgatcagcagggtcttcagaagtttagttttgaattgtatcttcagaagtttagttttgaattgtaatcartcataactgtaactatagtgatcattccttggatttatgtgacatctttattttttataatttaatwctttaacgtgtatggttccattgtagttgtcactcctactgtatgcaaatagtaggttgaaggagataattcttgataattttctcagtgttggataatatcaaagatagaaatagaattcaggctacttatgaccactgatccttagttctctccactgaatcattgtttgcaaatatgtctgtcagatctgtgagaattttttactttgtctttctagcttaatgataaaataagttctatgggcaaaaactcatttctcataatactttcttgttgcattaacatttttgtaagattggactttgtttcttaaaccagtgttctacaacttagggtctaaatactgtttttgctttctggtggcagttcaaataaatgtccactgagtggctatatattggccacagagagaggcccttagatacagaaatgaataagacgttgtcttgtctttaagaaatgcattgcctagctgcagagcatacataaattttgttacattgtgtagatgtcacagtggaagtgtgttgaaaatacatagagtatactggttgaagatggcatgaaaggaaagttcatcttggaatgcttctcaggggactaatgtctaaactgggttttaaaggacaaatatgcatttactaactagatagggtgggatatgggaagagaatttttatgaggtcatttcaggtaaaaggaacataatgattagggaaacattatacagaagagtaatccacatatattccagaagatgtttttaagcatgtttcttcttgctttttaagtaaaattttgcggtaattagagcatttatcaagtagtacttgtactgatccaagcttctttccatctgtgatcattgataagcattaaggtgtcactaataaatgataaagtgagtagcaggtaataaaagggaaatagaagaataagatgcctggattatctaccaactttataaagaaaaggtaactatgtgttttctaaaatataaattctgcagaagactcatttattcaacacatgtatattgagctggtatctccacttcacaagccataaaactaaagcacagaggtaaagtaatttgcctaagcttaccagtataaatggacaaggcagcttacattttgattccaagccagtgcttaaagaacttgaaaaaagctcagagggtctggagtgctgttaatgagagagagacacaaagtaaggctggaagctaggccgtgaagaggtgggacagaatggctggaagctagagaggcaaagtaaggaccaaggaggcatttttgtttgtttttaagatgggcaatgcttagcatgtataaatgctgataaaaattatccagcaaagagagacaattagaaagtacagatgaaagaaggggggatcctcaatagtaaaggtttctgagaatgtaagagggattaggacccagaacaccaatttagagtttgccagaaggaacaccccctgggagggcagagatgggcatagtacagatgaagagttaaggtttgtattgggaaattaaaggtggttaatttatctcatgtattggcctattgggctgctttgcttgtgcacattgtcctttaagtatcccggatatacctgaaacaacaaccttatatggattagaagtgctcttggcattcatctgggagtcttaactgtagatatggacaaggaggggttggtatttgggagtcttaagagagaaagttgtgactccctggtacaaaggaaaaagtgagataatgctctgctcatttgtttaaatgggagcagagaatgaaagccactcaagcctgggtctaggagatgtggagagaaatacacattaagccatcggaagaggaattggaccaagagagacatagttcctacagctcatctaccttaaaggtaatgaaaacctaccatgtaaartaatagaatagcatcacacttaaagaatctaaccttttttctaagtgcttttatatgcaataacttttcagatcacaaatcataaagccaggcgcggtagctcacgcctgtaatcccagcactatgggaggccattggaggtggatcacttgcagcctgggcaacatggtgaaacccatctctacaaaaaatacaaaaattagctgagtgcagtggtgtgtgcctgtattcccagctactcaggagtctgaggcaggagaactggttgagcctgggaggtggaggttgtagtgagctgagattgtgccatcgcactctagcctgagcaactagagtgaaaccctgtctcaaaaaaaaaaaaaatcaacacaaatcatagaattctaaagctgaaggatccttatatactattatggatcatttaataaaaaagagaactgagacccatcaaagttgagtgattaatccaagattccaaacagcttttagtggcaagttcagaactcaaaccacaggtttttaacttgcagtttactgtctttccaccacaccatgcttcctttaaacatgatcctcgcctctccaaacattttttctcttataatagtttattcatctattcttcttcttctattttttttttttttttttttttttttttgggacggagtcttactctgtcgcccaggctggagtgcagtggcatgatctcagctcactgcaacctccgactcccgggttcaagctattctcctgcctcagcctcctgagtagctgggactacaggcatgcaccaccacgcccagctaatttttgtatttttagtagagataatgtttcaccatgttggccaggctggtctcaaactcctgacctcaggtgatctgcctgcctcagcctcccaaagtgctgggattataggcgtgagccaccacgcctggcccatccattcttcatatattgtgtttttcagattctgtattattttagtgagtccttagcatttagttgatatttctcttcaaatacctaatttaaatgatcagctacttggtctgcaaaatgtctgttaggtgaaaccatcaaatttattttgttattttgtttcaataaatatgatgagctttttttcatgtgtttgttggtcgcataaatgtcttcttttggcaagtgtctgttcgtattctttgcccactttttgatgaggttgtttgtttttttcttgtaaatttgtttaagttcttcgtagattctggatattggccctttgttagatggatagattgcgaaaattttctcccattctgtaggttgcctgttsactctgctgatagtttctttcgctgtgcagaagctctttagtttaattagatcccatttgtcaattttggcttctgttgccattgcttttggtgttttagtcatgaagtctttgacatttcatattttttttgaattcctgtgttttctttttgtggattgaatcaattttcagaacatgaactgaatatgtgaagttgaaaataaatgattaataacttagacttgtacttttggatatagatttcatttcgttatcataggaaccaatgggtaagataatgacaaaattaggtaaccatcagttaagggggaaatgtttacatgaactttaaaacaggaccagaactaaaggtttctgaatctttgatattttaccttggtgttctttgataagttgtcataggaaccaatgggtaagataatgacaaaattaggtaaccatgagttaagggggaaatgtttacatgaactttaaaacaggaccagaactaaaggtttctgaatctttgatattttaccttggtgttctttgataagtccgctttggattcattatcttcattgatggaatgaagaggtttatcaatacatgcaggaattgtttacaaaatacctcccacacatgaggaactgagtataccatttcatttctcaacttcttcgattttgttctccatttgctctcctatagactgaaatgccttctaccgccccatttttagtttctcttggtgatagcwtgccctccaggctgaggctattttttagttcatcctgcctgcccagactaacaaagcttctaactatatggcattcgagtggtttgtgtaattctcttttgaaacagaggtagtgtcccaacacatctaaacaaagtcccattcagcaactcttgttagctattaaaatattaaatgaaagacagatccttataccccagcagtcagatgattggcatgtccaagctgtggaatacgtacatggcttagttgcctttcctattgtagatcttaagaactacctgtcagtttctcttgaaatcaacttgcaggcaccaggcaggtaacagataccgatgtggcagcttgattgcaaagcaggactagcctcatatctcagggggacagctgcttctcagctttagccaattattgccaggccagagtacccatccaacattgccaaatttctcactttttaaaggttttttgtgaattattctgattttgaaatgttagcacctaatgtgaatttcccaagcactctgaggccaaagcagatccttctgtaaaccagactgtgagtttgcaacttccaccctaaggcgaacagtgtgacatggatccctgtgcctccacattgcttcacctgccaccactaccagtattagccagctctgaaaacattgagggctctggggctgttaggaagaaagaagaacaaaaggaggtaggaacttgtttagttctgtgtgttacctcagctcctatacttttcccctttgaaggggaaaagcatttatatttaaaaataaataaaagcctatgttcctctgagaaacactttcttttcatggatgataactcaattttgttttaagattgaccttacctgtctgttgaaattgaccatagcacatccttgatccttgagattttactattcaacctgtttttctgtttttgttgttgttcttttcactccctgaaattaggagagtagtacatatttgtgtcttccacagacgatacagactttaagatgtagaagctcatggttttatagatgaakggatttggaactcttcccttcagggtcaatgtacttgattgtctgaattaaacttggttcccaagttaataactcccaagctaataagtcaatttttgtgactagttctaaggtacacttctgtcaatgaagaaaaactttctggtatacttttgtggaaaaatagaaggaaagataggggtaacaggcagttgttaagtaagacctaaaggtgactgggtgtggtggttcatgcctgtaatcctagcactttgggaggctgaggcgggcagatgacctgaggtcaggagttcgagatcagcctgcccaacatggcgaaaccccgactctacgataaacaaaaaattagccgggcgtggtggcaggtgcctggaatcccagctattcaggaggctgaggcaggagaattgcttgaacctgggaggcggaggttgcagagagccgaaatcacaccactgcactccagcctgggcatcaagagtaaaactccgtctcaaaaaaaaaaaacaacatattcctatcttatggaaagataggaatattgtaagtgaccaatgaaaatttctagttactgatgccatccttccaaaacattgttttaaatgttttatatatataaaacagaagaggattaatataatgaatctttatgtgcctatcacaagcttcaacagttaccaactcaagtatacacacccccaacccctgtgcctcccactggagatatatttatatgtaatttttagcaacttaaaacaattttttttagagtcagagtctcactgtgttccccaggctaatcttgaactcctggcttcaagctgtcctcccacttcagcctcctaagtagctgggacttcaggctcatgccattgcatccagcttggatatttttttaaaagcaaatctcagacttacatgaaattaaccttaaatactttggttcacatgacatttcaattagtttcctctgaggagggaagagttattagtgaatgagctagagaaaagacaataatagaataaaaaataattagggctggacatggtggctcatgcctgtaatcccagccctttgggaagctgaggcaggtggatcacctgaggtcaggagtttaagaccagcctggccaacatggcgaaaccctgtctctactaaaaatacaaaaactagccaggtgtgatggtgggcacctgtaatcccagctggtagggatgctgaggcaggagaatctcttgaacctgggaggcagaggttgcagtgagccgagatagtgccactacactccagcctgggcaaaagagggagactgaaaaaaaaaaagaaaaagaaaaagagagagagagggagggaggaaggaaggaaggaaggaaaagaaaggaaggaagggaaagaaaggaagaaaattacagaaaggacagagttaaggaaaaattattataatatgaaagttgcctcagaagaggctacagaaagttgcctgagaataggctacatttrccacggctttaaatactgtgtgtgcttatatatgtctactctttttagttacgtggaattgtagccaaagattatttctgtactggatgcagcccctgggaagaagctttcaaagtgacccctagggtttcatttatagggaaggaggagcttggagtacttacaatyaactgaagtagaaaaggcttttaagctgatagatttgttgtggaaagtgtccatcagtgcctttatgtttttacctggtccttaaagtttttatttgtggtacagcagtttattcatatatatgtatgaatgtgtatatctgaaacttgaacaaataaggtaattaatgtttttagtctactttaaattgcatttgccttctattttgaattcccatccaatttcctttgctattctttagaactagtccaactctatcccgcacctgtaaaacttttaaatttacttattattaaaattagtcttttccaggctaggggtgtttactgaatcttactttgcctagagactgctaaatgatttatatgttttaaattatttaatcctgctaacgatcttttcagacgtatactatattttccattttgctagtgaagaaactagattcaatgaatttaaggtttctcagacaaagtggcagaacctatatttgaatcatttttttgacytcagaactagtatcatctccagtgcctacgatgctacgtagagctgtctagtccaggtacagtgttttctgcttataagctcatgattttagattcatagtactgagctatagattataattatctatagcaaaagacctgctttgtgaacttgtcaaatttatctgttttgttttgtttaagatggagttttgctcttgttgaccaggctggagtgcagtggcgtgacctcgggtcactgcagcctctgcctcccaggttcaagcaattgtcctgcctcagcctcccaaatagctaggattacaggcatgcatcgccaagaccggctaattttttgtatttttagtagagatggggtttctccacgttgatcaggctggtcttgaactcccaacctcaggtgatctgccccctttggcctccgaaagtgctgggattacaggcgtgagccaccgtgcctggccagatttatcttaaaggcatgttgtttatcacttatttggttgtgaaggtcaaacaagtataccagccatttttatttatagcataatatgtgaataatgtatacatgagctatacaggagtgatgaaagtgattatataaagttttcacacccacccggaaggggaatatcagcttcagtggtcattttcaggcctgttctctattgctatccaatagaactttatgcagtgatagaaatgttttatatttacagatgtgtaatacagcacctgatagctactatggttattgattactaaaaagttactaatatgactaagggactgaatgttttattttattgccttttagttaatttaaattaattaaaaattggtcattagtggctaccatattgaacagcacagctctataagattatagtttgtattatgatttatatgtattataaaatatatttattttaaggcaaaaatagaatacttgatttaatttctttttctgagattcttgttggggcaagaagcataatttgttaaattcattgcctactgcctttgagaaaatacgaaaattgccttagatactaaagattcatggaactaaacttactttggtttattttatgcagtttcatcatgcagcaagttataaatattacataattgataatgcttctggatgagtggaaattttcaggttcaaaagttagccgtttcgtccaggctcggtggctcacacctgcaatcccagcactttaggaggctgaaggaggcagatcacctgaggtcaagagttcgataccagcctgttcaacatggtgaaacctcatctctactaaaaatattttttaaaaattagctgggcgtggtggcgggcacctgtaatcccagccactcaggagactgaagcaggagaatcgcttgaacccaggaggcagaggttgcagtgagctgagagatcacgtcactgcactccagcctagatgacagaatgaaactccatctcaaaaaaaaaaaaagttagctgtttgaaagtttgctaatatttaagcagtaaacagaaaaattaaactaaaagtcaccattggagtaaggacttcttgcagctacaggtgtaaaacattgtcaaatagcaattctgagccaagtcaggaagggacatttaaaaatttcgcacatcctgaccctctttccacaccccctacccctgccccattcaccacctttacacccttgaatattctgatgtgtttctctttctgtttcaaggtactttgtataatgggaaatcttactgataatagtgaagtacccatgagaatgagattgacaggaaaaaaatacttcagaaccagagttttagactttaatatttaggatgaatcaatgaaagatttgttacttgaaatttttctatttttatttttttaatcttttggctgctgtcaaattaatataaatatatcaacccaaagattcctttttcttagttgttttcagagttggtaccccagaaatttatgttgtcattctgaatagatccctctaaagttaactatgttgttagaagatttgtttcataaggagaatttctagatatgttaagctctggaactggatgaaaacttttttctttgtgtatatcttacttttttagacctttatgtttttcagattttaaaaagcagatagagatacacaattgctttaaaaaaatcaaagacagtgataaaattcctcattggagcaaagaatcctaatttcttctgttagggtctttctttgacagaatagtaataggacatttataataagaggaaattatagtaatattctttcttctctgggcatggtatgcttcttcctttgtgctttgatttgagcttcaaattttactaggcaagctgggcactgacattgtctcagtaagctgaaagtgtattaaaatgagatgaagagatgagttttagaagcctattggtgactttgtagccccaaatatctcatgtatatgggagtagtcttatgtttaagagaagaatgaggcagaaagaattgacaaagtcgaatgattatgctttctgcatagctaccaattccattaatacagtattaggccggtctgaactgtgacagtctgggagtctgtcacatatgtaagaaatagtcaggatcactttcatttagtttttatcagttacccaaaagaaggtgataagaagtatcatgacgggaagagagggttcaaaaaagttagcttataatctacaaaccacagtgtctttgggagttaggagacctgggttcttgttttagtttgaatattagttaggtgtctgaccttgagcagtgatttaacctgctttgatcagagttttatttttttctttctgtccctttttataatttgggaatatttgattatagtcaaagtaatgtatgtaaggtactgtttctacaatagcaaaataataaatttagcacatatcaccctacaactcaatttaaaaatataggaatattagtgatactattgaatttagtactgggtggattagaatagatctctgtgtctcctcataaacttttttgttgttttcttcccccgacttagatctagggactgtctggaagaattttctgattctaaatagtttttattcctagaatgattttcctctgtcatcagtagagttcagtgtccctgaagtaccaatttcataagtggttaacgtggtatgtaataaatgtgatcatttttctctgaattctaaatgtaacatcttttttgcatgtctggtagacatatatgcagcatgtctaaaatcaactgatattacacattcagtgtaatagctatcaagattccagttgccttttttttttgcagccttggcaagctgattctaaaattcatatgaaatgcaaaggatccaagatagccaaaacaattttgagaaagtctcatacttctgattttgaaactactacatagctatagtaatgaatgaagactataagtactggcataaagagagacatacacacgatcagtggaatactagaaataaaagcatacatttatggtcagttgatttcaacaagtatgcttactcattgggggagagaacagtattttcaacaaatagtgccgcaacaatagttaactcacatacaaaagtacgaagtataaacccctactttacactattcacaaaaattaactcaaaatagatcaaagatgtaagagctagaacttgaaagaaaacctaagtgtaaatttttgtgacttggtaggagacagtggcttcatagatatgacacctaaaaacatacaaccaaattaaaagtacataaactgaatttcattaaattaagaaacttctgtgctttaaaggacatcattaataaagataacccacagactaggaacaattatttgcaaatcatgtttctgataagggacttgtatcaagaatatataaaaaacttataactcagcaataaaaagataactcaattaaaaaatgggcaaaggatatgaatagacgggcatcatcaataaagtgtaaagataacccatagactaggaacaaatatttgaaaatcatgtttctgataagggacttgtatcaaggatatataaacaacttataactcagcaataataagataactcaatgaaaaaatgggcaaaaaatatgaatagacattcatccaaagaggatatacaaattgccaataagctcatgaaaagatgctgaacatctttaatcttacccatgaggatggctataatcaaaaagaaagacaatagtaagtgttgacaaggatgtggattaattgaaatcctcatgcactcctaattggaatgtaaaatagtgcagccactttgaaaaacagtttgctagttcctcacaaaggtatgcataaagttaccacataatccagcccttccacttgtagatgtattgtacccaagaaaattgagaatatatggtgacaaaaacatgtatacatttggtctttcactatttttcatgttatcctaaargtagaatgaagccaaatagtcatggacaaacaaatgtgctgaatccataaaatggactagtatccatgaaatggaatactaatacactgtatcacatgtatgaaccttgaaaacatcatgctgagttaaggaagccagacacaagaggccacttattgtatgatggcgtatttatgaaatgtcctggaattagatagatgattgcacaactttgtgaatacattaaaatctgcattgtatgctttaaaagagtgaatttcagggcaagtgaattatatttccattgaaaatattgaatttactaatttccttgtcaatcctgcccctcctacagtcttctctatttcagaatttagagaccatttgaaaggtgttctgctgtcagaggtggtagattcttaaatgagaatgagatccagaggcagtcagtagagtgataatttgaggttctttaggaatagactgttccccaatcctgtactttgtatccacrtaaaaaattctttgggcaggcatctagtaatgtaacaatctaacttcagatgaatcagtaagtgtggctttctggttcctttggaaagatcaccacagcttcccatggctggcattctcgggatgaatgagaactactttacccataaaattaactattaatacagtctactccaaagcacctcccatctcttctctaaaaatagattgtcatgaatagtgctttaacagaatggctatgacaacactgttagctgttcaccaaaatttgtttcttactcttattgaggatatagctagcctacttttccctactttccttacaggtaatgtaaggccatgtgactgagttctagccaatgaaatattagcagaagacacttcccacatgtgttttcttgctattcccccttgccagctagatggagaacctaggtgttggcaaaacctcaagatgtaaggggcctggattcctgttaccacatggaggagaactgcttgcaaatcagcaacaccttctcctactactatgtgattaggaaataaattcctttttcagatgaattcttacatgttttggagtctatttgctatatagccaagtctaccctaatcaacataccagctgaatgtaattctcacaaaaaataatgacaaaaaaagaaaaatctccaaagccagtatcatgacaggcaatgaactaaacaaataaaattaattcaaggaaataagcaaagtagattttggaataatttaatcctttagagatgtggaatattttatccataaacaataatcaactagagatactggcaagctgaaatttttaaaaaatcaatagttgggccgggcgcggtggctcatgcctgtaatcccagcactttgggaggccgaggtgggtggatcaccaggtcaggagatcgagaccatcctggctaacacggtgaaaccccgtctctactaaaaattcaaaaagaaattagctgggtgtggtagtgggcgcctatagtctgagctactcgggaggctgaggcaggagaatggtgtgaacctgggaggcggaacttgcagtgagccgagatcgcgccactgcactccggcctaggggacagagtgagactccgtctcaaaaaaaaaaaaaaaaaaargaaaaaaatcaatagttggcctcagtagtagtatggagtcatttggagggtgaactagaaggttgaaaaagaaactcttgtagttagaaagtgtaagaagtcggccggccatggtggctcacgcctgtaatcccaccactttgggaggccgaggcaggtggaccacatgaagtcagggattcaaaaccatcctggccaacgtggcgaaaccccgtctctagtaaaaatacaaaattagccaggcgtggtggcacatttctgtaatcccagtcacttgggagggtgaggcaggagaatcgcttgaacctgggaggtggaggttacagtgagccaaaatcgtgccattgcactccaacctgggcaacaagagcaaaactccgtctcaaaaaaaaaaaaaaaaaaaaaaaaaaaaaaaaaagtataagaaggcattgtgatcccattcagtggccaggcacactgaaagagtttgagcaggtcattgacataaagatagttttcatttgtgtattcttcttgacccagcctaagttatatatacctcttgtatataattgttctgtggtttctggtgcctcttttgttggctgaaataaaaaaatagcaagactgttggatttggagaatgggaatggaaaatttgctctcctaatattctccattctaaattgtagtagcgcattgagagagacccaagaccacagcacaattcacaattacaaagatacagaagtatcataagtgcccatcagccaatgagtggataaagtaagtgtggtatgtatataccatggaatactactcagccatgaaaaagaatgaaaaatgtcttttgcagcaacctggatggaactagaggtcattatcctaagtgaagtaactcaggaatggaaaactaaataccaaatgttctcacttataagtagaagttaagtcatgggtatgcaaaggcatacagagtggtataatggaccttggagactcagaaaggggaggatgggaagggggtgagggatgaaaagtcatcttttgggtagagtgtacactatttgggtgtatagtagactaaaagcccaggctttaccactctgcaattaatctatataaccagaaatcacttgtattcctaaagctgttcagattattaaattaaaaaaaaattaaagatttaaaaagagagagagtgagagacccaataaattaataatgagagcctggtcactatttgtgaaaggctccgaaacaatgtttttatataatatgaatgttgatatggtttcactgtgtccccattcaaatctcaacttgaattgtatctcctggaattcccatgtgttgtgggaggctgtactgtctaaaaatggctgcaccaatatttcctattaacacatgttcttcctggaagggacccagtgggaggtaactgaatcgtgggggccagtctttcccatgctattctcgtgatagtgaataagtctcatgagatctgatgggtttatcggggtttgcacttttgcttcttcccgatttttcttttgctgccaccatgtaagaagtggctttcgcctcctgtcataattctgaggcctccccagtcatgtggaaccgtaagtccaattaaacctctttttgttcccagtttcgggtatgtctttatcagcagcatgaaaacagactaatacaataattggtatcagtagagttgggcgttgctgaaaagatacccaaaaatgtggaagtgactttggaactgggtaacaggcagaggttgaaacagtttgaagggctctgaagaagacaggaaaatgtgggaaagtttggaacctcctagagatttgttgaatggctgtgacaaaattgctgatagttatatgaacaataagatccaggctgaggtggtctcagatggagatgaggaacttgttgggaattggagcaaaggtgactcttgttatgttttagcgaagagactgacggcactttgcccctgccctagagatttgtggaactttgaacttgagagagatgagttagggtatctggcggaagaaatttctaagcagaaaaggattcaagaggtgacttgggtactgttaaaggcattccgttttaaaagggaaacagagcataaaagtttggaaaatttgcagcctgatgatgcagtagaaaagaaaaatctatttcttgaggagaaattcaagctggctgcagaaatttgcataagtagcaaggagcctaatgttaatccaaaagaccatggagaaaatgtctccaggccatgtcagagaccttcacagcagcccctcccatcacaggcctggaggcccaggaggaaaaaatggttttgtgggccaggcccaaggacttggtgtcttgtgtcccagccactccagccatggctgaaaggggccactgtagagcttgggctatggcttcagagggtggaagccccaagccttggcagtgtccatttgttattgagcctgcaggtgcacagaaatcaagaattgaggttgggaatccctgcctagatttcagaagctgtatggaaacacccgcatgcccaggcaaaagtttgctgcaagggcagggcccccatgcagaacctctgttagggcagtgtggaagggaaatgttgggtcggagcccccacacagtgtccctactggggcactgcctagtggagctgtgagaagagagccaccgtcctccagaacccagaatggtagatccactgacagcctgcactgtgtgcctggaaaagctgcagacactcaacaccagtccatgaaagcagccaggagggaggctctaccctgcaaagccacaggggcagagctgcccaagaccatgggagcccacctcttgtatcagcatgacctggatgtgagacctggagtcaaacaagataattttggagctttaaaatttgactgccctgctggatttcagacttgcatgggccctacaacccctttattttggccaattcctccatttggaactgctgtatttaccccatacctgtactcccattgtatccaggacgtaactaacttgctttggattttacaggttcataggtggaagggacttgccttgtctcagatgagactttggattgtggacttttaggttaatgctgaaattagttaagactttgggggactgttgggaaggcatgattggttttgaaatgtgaggacatgaaatttggaggggccatggggggaatgatatggtttggctgtgtacccattcaaatctcaacttgaattgtatctcccagaatgtccatgtgttgtgggagggacccagggggaggtaattgaatcatgggggcctcttttccatgccgttctcatgatagtgaataaagtttcacaagatctgatgggttcatcaggggtttctgcttttgctgcttcctcattttccttttgcctctgccatgtaagaagtgccttttgcctccccagccatgtggaactgtaagtccaattaaaactctatttcttcccagttttggtatatctttatcagcagcatgaatacagactaatacaaatgtttataatttttcctatattttttgacttctctcccccttctgtttcattttggatgttttgctctgtcttcaagtacactaatcttttcttctacaatgtcttatctgttgttaaccatatcaaatgtatttttatctttttcagacattctagttttcacctctagaagtttagtttggattttttgtgcgtcacatatctcaaacatgctaagtcattttctctagcttcttctacatatggaatgctgtaattagtaacagttttaatatccttctagtggtttaaactactggttttagttgattggttttcctcctcattgttggtcagtttcctggagtttgtgtggttggtaatttctgtgtgtgtgtgattttttgtttctgtttttattagctcatcaggtgtttttagtgttagtggtttgttttttttttgtttttttgtttttttgagatggagtctcgctctgttgcccaggctggagtgcagtggtgtgatcccagctgactgcaacctccgcctcccaggtttaaatgattctcatgcttcagcctcccaagtagctgggattacaggcatgtgccactttgcctggctaagttttgtatttttagtagagacggggtttctccatgttggccaggctactcttgaactcctgatctcagatgatctgtctgcctcggcctctgaaagtgctgcgattacaggcatgagccaccgtacccggccagtaattttttactggatgccagacatggtatatatttccatgttagtgttggaaatttttaatattcataggaatattgttgagctttattctaggacatagctagtttacttagaaacggtttgatcctttagggcctggctctttaactttcgtcaaataggactaaagcagtatttaatttaaagatgattttgccccactgtgaaggcagaaactcttctgagtacacaatattctgtgtgaattatgagcagaaacaattcctggtctggagattgttccctcaaatctttcaagtgattctttacctgtgctttggtagtttgctcactggcatgcattgaagagtactaggctaaagacttgaagggatgtttggatgtagtagatatggatatctctctcatgtgaactttaattgtcttggccttcccagatgctcagctccccctcttcaactcacagagactggatattctgaggctccatctgggtcccccctgaaagctcttctctaggcttactctttggctttcataggctaacgtcttttgatttctgtctttcaaggatcactggcctttgttgtctcatgtccagtgtcttaaaacccattgtttattttgcatttttttttgtttctttgttttcagatttagatagagggttaaatccastctgttactctcttggctagaactctttctatagttttaagagtctcgtaaaagcagtatgagaaggctctgaagctcaattgcttcagtttaaatgccgggtcttctactactagctgtttgaccttggatacgttacttaacctctctgagcctcagtttcctaatcyataatagaaacataaaattttttagtatcatagggtgtttttgaggattaatagagttaatgcatatgaagtgcttcaaatattgcctgttatataagctctcaataagcgagttattcttttttttttttttaattttattttattttatttgtttattttttttgagacggagtgctctgtcacccaggctggagtgcagtggcgtcatctcggcttactgcaagctttgcctcccagaataaacaagttattctaaaataaaatttctattgcaagagactccacctttggaaggagacagatgttggtttcattatcagctctaccacttattgtggacttaattaaccgttgttaatctcattttactcattacaaaatgtggaccaggtgccatggctaatgcctgcaatcccagcactttgggtggctgagagcccaggagtttgagaccagcctagacaacacagtgagaccctgtctctacaaaatatacaaaaattagtcatatatggttgtctttgcctatagtcccaggtactcaggaggctgcagcaggaggattgcttgagtctgtgagttcgaggctgtgatgacccaaggttttgtcactgcactgtagcctggatgatagagagagaccctgcctcaaaaaaagaaagaaatggggatgataataaacctacttattaaatagttatatggataaaataaaatggtatttgtaaagcacttggcacagtgcctggcacagatgagttactcagtgattattattgttccaattattttattttttattttttgagatggaatctcactctgttacccaagctggagtgtagtggagcaatctcgactcactgcaacctctgccttccggattcaagtgattctcctgcctcagcctcccgagtagctgggattacaggtgcccaccaccacacttggctaatttttgtatttttagtagagacggggtttccgcatgttggccaggatggtctcgaactcctgacctcaggtgatccgcccaccttggcctcccaaagtgctggaattacagacatgagccaccacgcccagccaaaacaactcttaaaataccattgcttgttttattatctgtaatggttcaggggtttggctgggttcactcgggatttctcattgcaattgtattggatggtgtcatctttgaggctttcctagtcacatgtctgtcagttgatttaggttctttgctggaatctcacctggtgctatggacaccctcatttgatctctttagttcctcatagtatggttactgaattccaagaacaaacatcccaagaggatcaagtgggaagactatcttttatgacagcttcagaaatcacctagtattacagtgtagttgtaatcacctagtattacaatgtactaggttatttctattttagtcataggcccacataatctccagaggaggaaacatagactcctctcttagtaggatgagggtcaatgtcaccttgcaagaagaacttgtgtgatgggaagtattggtgcagccatttttagacagtacagtctgccacagttagctattattcatgtgcatgtttacatgtatacacacatttcacatacaattttgggtcctctccccttctttacaaagtttttttgtgagctcttttgtctatatctgaagtacctgtggccagcattcttctggcttccatttgagccttataaatcattattagtctttaatcagagtgcatgaagtctgccttttgagactaatacattaattccttctcatttttatcattaatgaataatttgcccactcatatgtgtttatggaggacatcagcaattggcataaagtctttactcctatttcttgtgttttgcatgtgattgctaataatttgtgttatagtgaatgtcttagtattttccaactgttgttcaactgaaatatcttttattactttacaaagagactgaattccagattgatgtgattgaagtttcatcataagattactttgagatttttcaaagtaaatgtatagcggctgttcagataaatgtcaacattttattgatgtcaactcaacaattaattgccaagagtggttttcattaaaattggtgtgcagctgagagcgcaggaaatctttgttaaaagaggaaagatcatgaatcataatgcctagttcttatctacttaggctatttgtgtatttttctatttcttttaatcttgcttaagcccgatagacctggagatttggccaaaaacaagaactctaaaatactaaatattaaaggagctcaagtatttccttttcctttgtaatttagcatacatatttgggaagtcgggtctgttctgtccaggaggcaaaactatggcaactcttcatctttgtacaatactctagagtttccaaaattactctaactaaatgggctttctagtcgaatacatttcagtaaaataaaaagaatatggcttctggtacaaaatggtagaataagtaaccactgtcatttcccttgtttccctctcaaaatctcattaaaactcattataagtataaaaaataaacccatgatagtgaagagagactggtcatttgtagatgaaaaggttcagcaaatttactgaagattgctgacagctgaaatagaaaaagaggtagttccagcccagagtacaaaatagaaggaaacttagtggacctagcagctgatttttctacatatccaacagcagaagggataaaacacaacatattacctagaattataagtccaccccttcattctgaaccaccagtgatcatccatcataggaagcaaatgagcattttgaaagagggagactgtcctcagaagaagcagattattcagggaacataagatacttcagaaaaaatattctgagaaacatagagaatgctgaaaagccacagcatttataaaatgaaaaatggctatgaaaaatgaacaggctgagaataagaaagagctcttataaatcaaaagtatgattcttgatattttaaaacttaataaagtgttggccaggcacagtggctcacgtctgtaatcccaacactttgggaggccaaggcgggcagatcacctgaggtcaggagttcaagaccagcctggcaaacatggtgaaaccccatctctactaaaaatacaaaaattagctaggtttggtggcgcgcctgtaatcctagctaggaggatgaggcaggagaatcatttgaacccgggaggtggaggttgcagtgagctgagattgtgccactgcactccagcctgggtgacagacagagcgagagtctctcaaaaaataaataaaataaaataaaaagggttgaaacaaggaacctaaaaagacagaaaaatagaggaaagaaaattaaacagaacaacccaagaggttaaacacatagctaagagatacttcataaagagaaaataaaataggaaaattaaacattaaattgaaggaattatcaaataaatttcataaggaaaattttcacgtcttatttttccagctcacaccttttctactccagttccaacaattagtcaaaacactaccaggacctacaatctattgatccttccaaacgctacacctttgcacagtctctcactctcctgatagcctcttttcttcatacctagattaaattccatggttaatcattctaatactttcctcaaatacactctcaaatttcttgctccttcttattttctgtcctcatgtggctaggacagttctggttaaatccgacttttcatcaagcttgttcctgtatgcccgtacttctaatggtggttggagaaaaacctgccaattattctagctttaaatccatgctctggctggcagtcatactatactgcactattcattctctatcattctccatgacaactatttctttctttctcccatgtcctcaaatttctaacacctcctcctgcatcttaacacccagttgatgacactgcttcctccgtttccaaggaaatgaagctatcagacaagaagtattataagctctctatatctactcatgtctctgcttttttacccctgtattttatcgtctcccctaataccctggatgaactatccgtctgttgattctgtcatacaatttctttctttttttttttttttgagattgagtttcgctcttgttgcccaggctggagtgcaatggcgcaatctcagctcactgcaacctctgcctcctgggttcaagcgattctcttgcctcagcctcccaagttgctgggattacaggcactcaccactatgcccagctaagtttttgtatttttagtagagacaggctttcagcatgttggccaggctggtctcgaactcctgacctcatgtgatccacccgcctcagcctcccaaagtgctgggattacaggtgtgagtcactgcaccaggccgtgtcatgcaattttttttgtttttcttttcttttttttttttttttgagatggagtcttgctctgtcacccaggctagagtgcagtggcacaatctcgacttactgcaacctctgcctcttgagttcaagcaattttcctgcctcagcttcccgtgtagctgggattacaggcacccgccactgcacccggctaatttttgtatttttagtagagacagggtttcaccatcttggccaggctggtctcgaactcctgaccttgtgatccacccgcctcagcctcccaaagtgctaggattacaggtgtgagccactgcacctggcccttgtcatgcagtttcaaccattgcctcctattatgtactcaagaacattgctctggcaattctatagattttctcccactcaatccattctctattgatcgttcttattaccataaaagcacactattttcccctttatttacttatttatttagatggagtttcactgtgtcacccaggctggagtgcagtgagccatcttggctcactgcaacctccacctcccgagttcaagcgattctcctgcctcagcctccccattagctggaactacaggagtttgccaacatgaccagctaatttttgtatttttagtagagatggggtttcattatgttggccaggctgatgtctaactcctcacctcaagtgatccatctgcctcagcctcccaaaatgctggaattacaggcatgagccaccatgcccggcctatttttccctttaaaaacaaagcaaccaaaccagcctactcttgactgcatattctcctccagttaccactatatttctttacttctttactgcaaaattccatgtaataattatgtgtatttgttgcttccatttttcaggtcctattgttgttgggttttcatgctaaccataacaccaaaattacacttacggaggctactaatactccccagagtagctaaatccagtgatcattgctcatttcttattttatcaaaactattagcataatttgagacatatgttttcttctttttgattgtaccctccccgcccacgcctaccgctttaatagcttattgcagtataatctacatataaaaaattaacacataactgtataatttgtgttataaactatacacagtttgatcagttttagcatcactagaattcttttagaatttccgttttaccaaaaagtttgtgcctctttgtactcagtcaatccttgtccccacctccagacctagtcaacaaatgatgttgctttttttccttctttacagtttaccttttctataaatttcacgtagttgaagtaatatactgtctaatctttttttggggggttcctatttttttccagtcaccagctctctggcaaactgtgtaatcttttgtgtctggcttttctttccaggttcatscttgttgtataaatcagtagtttgttccttcttattgccgagtattttgttgtatgggtaaactacattttgtttataaatttactaattgatggagatttgtatttttccactttggggctattatgcataaagctgttatgaacattcccatgcaattctggatatttgttttcatttctctggcatgaaaaactaagagtaggattactgggttgtatgttaactgtatatattatataacctcctaagacaatgccaagtagttttctaaagtggctatactattttacattccctatggcaacatatgacggttccagtttctcctcattcttatcagcgcttttttttttgtctttttgattatagccattctaataatgtgtattacattgtggctttaatttgcatttccatgtaagtaatgatgttgaacagcttttcatgtgcttgtttgccattaagtattgtctctagtgaattgtctattcacatattttacctaagttttaattgggttgtctgtcttcttattaaagaattctttatatattcttcttacatagcttttatcaaatacaagatttgaaaatattttctcccagtctgtgacttgttactttattttgttaatccaatacaggatattacattgcatttaattattgtgtctttttagtctcttcattctgtggtagtttcttaatctttcctwatccttcatgaccttgatactttttgaaaagtactgatcagtattttgttgaatgtccctcacgtcggatttgtctgatgttctttcactttagactgagatgatggacttttggggagagtaccacagagatgctgcatctgtttctctttgactccattcttttgtgttaaacaaatgccttttgcttactaatgtacttttttttttctttttttaaatactttaagttctgaggtacatgtgcacaacgtgcaggtttgttacataggtatatatgtgccatgttgttttgctgcacccatcaactcatcatttacattaggtatttctcctaatgctatccctcccccagcccccmaccccytgacaggccccactgtgtgatgtgtcccccccgacactcccattgtccgtgtattctcattgttcaactgccacttatgagtgagaacatgcagtgtttggttttctgtccttgtgatagttttttgagaatgatggtttccagcttcttccatgtccctgtaaaggacatgaactcgtccttttttatggctgcatagtattccatggtgtatatgtgccacattttcttttcttttcttttttctttttctttctttttttttttgagatggagtctccctctgtagcctaggctggagtgcagtggcgggatcttggctcactgcaagctcaacttcccagattcacgccattcttttgcctcagcctcccaagtagctgggactacaggcgcccgccaccatgcctggctaattttttgtatttttagtagagatggggtttcaccatgttagctaggatggtctcgacttcctgaccttgtgatccacccacctcggcctcccaaagtgctgggattacaggcatgagccactgcgcccagcccacattttctttatccagtctattattgatggacatttgggttggttccaagactttgctattgtgaatagtgtcacagtaaacatacgtttgcgtgtgtctttatagtagtagtatttataatcctttggatatatacccagtaataggattgttgggtcaaatggtatttctagttctagatccttgaggaatcaccacactgtcttccacaatggttgaactaatttacactcccaccaacagtgtaaaagcgttcctgtttctccacatcctctccagcatgtgttgtttcctgactttttaatgatcgccattctaactggcgtgagatggtatctcactgtggttttgatttgcgtttctctaatgaccagtgatgatgaggatttttttgtatgtttgttggctgcataaatgtcttcttttgagaagtgtctgttcatatcctttgtacacttttggatggggttatttgtttttttcctgtaaatttgtttaagttctttgtagattctggatgttagccctttttcagatgggtagattgcaaaaatttgctcccattctgtaggttgcctgttcactctgctggtagtttcttttgctgtgcagaagctctttagtttaattagatcccatttgtctattttggcttttgttgccattgcttttggtgttttagtcctgaagtctctgcccatgcctgtgtcctgaatggtattgcctaggttttcttctggggtttttatggttttaggtcttatatttaagtctttaatccatcttgagttaatttttatataaggtgtaaggaagggatccagtttcagctttctacatatggcgatatatccctcattgttgaatgtccctcatttcggatttgtcttatgttccttcactttagactgagatgatggacttttagggagattgctgcagagatgatgcctctgtttctctttgactccattcttttgtgttaaaacaaatgccttttgcttaccaatgtaaatttttagccttttaaaaagttttttttcttaattgttgctctaggaattataatacatatttttaacatatctcagtctacttgagtttaacattgacttaattctgacttaattctggtaaaatatagccgtttcattccagtatcactctatttctttccctttgtggtattgtattatacaagtatatattatatgtaaraatatagtgttataattattcattttaaatcttttttaaataaagagaaaaaagaaaaatatgtgtatgcatgtgtgtattcagtcatttatatttatattaatatatacttaaatatttaccgttgtgaaacatatataaaactactgtaggaaaggtctgccagcaacaaattctctcagtttttgtttttctgagaatgtctttgtttcaccttcagttttgaagggcagttttgctggatgtgggagtcttggktggcagtattttttctttctacaccatgaatgtcattcggttgccctcttgcctctgttggtctgatgaaaagtcagcccctagtagtatcattgcttccrgtacataataaattgtttttctctttctgcttttaatatttcttctttgtctctatctttaaacagtttgaccctgatgtatctatgtgggcttcttttgtgtgtttatctgacttaggattcattgagcttcttgggtctgagagtaaatgtttttcttcagatttgggaagtttcggaccctgatttttccgtatttttttttctgcccctttctctctttttctgggccttccattatatgaatgttgggatgctttgcattgtcccaaaggtctctgtctgaggcttcattcatttttcttaaaccttttattctctgtgtacctcagattggataatttctattgctctatcaaattcactaattatttgttctcataagtttgkgatcccagtgttagtttccgtttgctgcatacaaattaccacaaacttagtagcttaaaatgatacccatttgtcactcacagtttgtaggttagaagtctggcaaggcatggctggataccctgctcagaatatcacaaggctgaatcaaagtgttagctggactgagttctcatctggaggatccatggaaaaaatctgtttccaagctccttctttttgttcacagaatttatttccttgcagttgtaggagtgaggtgcctgtttctttgcttgctgtcagcctggctcaatctcagattccaaggaccatccacatttcttaccatataggctcccccatcttcaagccagcaatagcatatagcatccttcttgcacagttgactgttgagcaatgtaagagttaggagtgctggtccctcacgcagttgaaaatctgtatatgcttttttttttttagacagagccttccttgctctgtcgcccaggctggtgtgcaatggcgcaatctcagctcactgcaacctctgcctcctgggttcaagtgattctcatttttggtagagatggggtttcaccatattggactgtggtaaaatagacatatttatttcttatctcaagagagatggtcagaaagttcaggaaaacaaaataactagataagaaagttwgtgtccaaaaacattatgtagattaaaagtaatatgattttgaggaatttttgragtataagaaacttctcctggccttgatgtagatagtagggaagaaatataacctgagagcacagcttggttctgctctgaacaatacataaatcctgagactacattgtgtattgattttttaattagaattagctatatatccaaagtctggcagtcttaattatggttctagaatataacataaattgcatcagcctgaaaaatgttttttaaaggtacaggtgatagaagttgtgagcgaaaggcatggtcactgctactaaaaatcttcatcctatgtagtggttctgaaacttcgttgcacattaaaatcacttgagaagctttcaaaatcttgatccccaaacttcatcaaactgcattataccagttaaataaaaatctttgctggcagggaaagctaggtatctgtttgttgttttcagtttgccaggtgattccagtgtstagtcaaatttgagaaccataaagctaaatttcacagaaatagtcctagaatcttaaatatattttctaaaatcacgaatgtgatgagtggtagagtcattcttataactattatcattgtgaaaatgaagggggaggtgaggtagaagggtgctggaagtggaccaaaatttttttttagtggaaagccaaatctcttatagtgggatgtggtaacaaaacaagattctgcattttgcttcaaagttaatctgttagttattttattttacttgcaaagaggaaatgtccctttagtcatgttcctaattttatgagaatctgtatcatctttttttatatagattgagttaattagagctagatcaatgaggtcgttatgaataaattattatctggatgttaaaatcaacttcatttggcaaacacagttgacatttattagtgcataggcaaagtattctataaaagatactttaacaaatgtagtttcctctgacagaccttagatacaaagttacatgctagtagtccttggaacctgtcatttgtttttcttggcaaaaaacttaggaagaagctcaacttttaaaatttcttatagtatccatatttgctatacattagcaaatacagataatataacgtacaaaataattatggatttactttaaattttatagtaattagaaggtaaggtaaatatatttcagccttctccttttttatctgactcagcctgtatcagccttgattgtgcatttgaatcacctgcagagttttcaaaatcagtctcatctttttaaaagttcttcattaacattaaaggagcccagtgctctgtctggcctcagagatgttcattagagcccagtgttctggcctcagagatatttttttagtcagattgagatttaagaacatggacttatgattttctctttccacagaagtcaacagataatgtcttcagttaatacataatggagttgtaaaataagtacattatttaagattatcaaggttgtcttcaggagtaggattgggacttgaggtgagaagggatcaagatggaggcagttgccctttactataagctcttccgtactatgtctttttaaaaataggaactatggccaggaaatacaattaacaattttttttttttttttttttgagacggggttttgctcttgtcacccatgctagagtgcaatggtgcaaacttggttcactgcaccctctgcctcctgggttcaagcgattctcctgcctcagtcttctgagtagctgggattacaggtgcacgccaccatgcttggctaatttttttatttttagtagatacggagtttcaccacgttgggaaggctggtctcgaactcctgacctcaggtgatccacccgcctcagcctcccaataaaaaatgtatagacatgaaaatattgctttccatgttagtcagggtttccagagaaacagaaccaacagtatatagagagagatataggaagagattcattgtgagggattggctcaagcaattatggagactgggaagtcctatgatatgccaacagcaaactggaggcccaggaaaattggtggtgatatttagtccaagtcggaaggcccaagaatcaggagcacacatgtcccagaggaggagaacatgtatttcccagctcaagcagacatcagatacacccttcctctacctttttttctattcacactctccactgattagatggtacccactcacattggtgagagtggatgtttacacagtctgctgattggagggataatcttttctggaaacatcctcacagacatacccagaaataatgttttgccagctatctcatcatcctttagcccagtcatgttgacacaccaaattaactatattagattctcttatattttgtagcaataggatgttttttatgagaattgaaatttatgaactcagagtgtggttattttgtatgaaaaaataattttaaacttaaaatcctttagaaagtctcttcttgattttttaaagtaagctttttactaaagtatatcatatgtgcagaaagggcccacatcataagtgaacagttctgtgaattgctcacaaatggaacattcctgtataaccagcatctaaactggaaatatgtattgcccaaatccaggacgtttatggtatgttttttccagtcactgttccctcatctccaaactactgttctgcctttgtacatcattggatactttgtttctgaacgttatgcaaatagaataacacgttgtacactcatttgtgtttggctttcttcactgagcattatgtttattaactttatcttgtcatgttgtgtagttgtaaatacttcattctcattgctatatggaattctatatcaagaatatgccaccggtggctcacgcctgtaatcccagcactttgggaggttgaggtgggtagatcatgagttcaggagttcgagaccaacctgaccaacatagagaaaccccatctctactaaaagtacaaaaattagctgggcatggtggcgggcacctgtaatcccagctacttaggaagcggaggcaggagaatcgcttgaacccaggaggtggaggttgcagtgagccgagatcgcaccactgcactccagcctgggcaacagagcgagactccgtctcaaaaaaagaatatggcacaatttatccattctagtattgatgaacatttgtgttgtttccattttaatctattatgaatagtactgctatgaaaattctctagccttgtagtatagtttgaagttaggtaatgtgatacctccagccttattctttttgcttaagattgccttggctattggggctttttttttggtttcatatcaattttaaaatagtttttttaaattctatgaagaatgccactcgtagtttcataggaataacattgaacctgtacattgttttgggcagtatggccattttaatgatattgattctttgtatccatgagcatgagatgttcttccatttgtttgtatcttctctgatctctttgagcagtgttttgtaattctcattgtagagatctttcacctccctggttagatagattcctaggtattttattctttttgtggtagttgtgagtgggattgcctttctgatttggctcttggtttggctgttgttggtgtatgggaatgctagtgatttttgtacactgattttgtatcctgccaatttgaagttgtttatcagatagaggagcttttgggtgtgcaaggctacacgaaccaaaacagcatggtgctgctacaaaacaggcacatagaccaatggaacagaatagtgagctcataaataaggctgtacatctatgactatstgacaaaaatcaagcgatgggggaaaaactccctgttcaataaatggtgctgggataactggctagacatatgtagaagattgaaactggacctgttccttacaccatactcaaaaatcaactcaaggcagattaaagactcaaatgtaaaacccaaaactataaaaagcctggaagacaatctaggcagtacaatcctagacacaggagtggacaaagattccataacaaagataccaatagcaattgcaacgaaaacagaagttgacaagtgggatctaattaaacttacaacctacacagcaaaaaactgtcaacagagtaaagagaaaatctacagaatgagagaaaaatatttgcaaactatgcatctcacaaaggcctaatatccatcatgtataaggaaatttaaaaaaattcacaagagaaaaataaccccattaaaaagtgggcaaaggacatgaacagacacttctcaaaagaagacatacgtacggccaacaagcatataaaaactcagkatcactgataattagagaaatgcaaatcaaagccacagtgagataccatctcacaccagtcagaatggctattactgaaaagtcaaaaaaataacagatgtgggcaaggttacggagaaaaggaaacacatacactgttggtggaagtgtaaattagttcaaccattgtggaaagcagtatggtgattcctcaaagagctaaaagcagaactatcattcgacttagcaatcccattactgggtatatacccagaagaatataaatcattctgctataaagacacatgcatgtgaatgttcaatgtagcactattcacagtaacaaagacatggaatcaacctaaatgcacatcactgacagactgaataaagaaaatgtgatacatatacaccatggaatactrtgcagccataaaaaagaacaagatcatgtcttttgcaggaacatgtatggagctagaggccattcttcttagcaaactaacgcaggcacaaaaaccaaataccacatgttctcacttgtaagcgggagcgaaatgataagaacttataaacacaaagaaggggaaacaatcgacactggggtctactcgaagggggagggtgggaggagagagaggagcagaaaagatgactattgagtactaggcttaatatgtgggttatgaaataatatgtacaacaaacccctgtgacgaatgtttacctctgtaacaaaccttcacatgtacccccaaacctaaagtacaaatttaaaaaaaaagtttaactcttaaaaaaaaaagagagaaaagaaaattattttctgttttcttttctgtgtatcttttctgttgctgcatttgcctaaaatttaagtttaggatctttcgccaaagaaaacacaatcagataatgaaaataagtaagaaattagcttttcatttacaaaaactccatgtgtagttttaagaatgcatatataatgtgcacctttcttgttcagcttagattagtttatagtcttatcttctgaacagtttggcctgtgaagtacactcatatttaatggaaaaacaggattcatgatagtaaatctggatatttataaattaacctctgttgcctcaggttttgtgccagcacaggggataaaaatgacaaaataaagagtaacaggttttgattctgataactgggctataagagaaactatgttcctttaaatactcacttctagccctgtgttttgagggctgttgcacatcaatcaccattttaactgatagattatcttccttctccaatgtttcagaacatgcagtgtaaaactggctttattcttaaatcctagttctctcctaatttacttcttcagcctttgcatcattcagtcttctctttgtttactcatagctttccattgacattttgtgggcagccatttgactttgttcctctgccagagtatcaccaacagcaggcaagggactcagatccgcctgttaatatttgggacatctaacgtatttcctcagggacaaccctgcctgaggttgccctggatcaattttccacccccaatttatttcttttcttttttttgagatggagtctctcgctctgttgcccaggctggagtgcagtggcatgatcttggctcactgcaacccgtgcctcctgggttcaagcgattctcctgcctcagcctcccgagcatccgggattacaggcatctaccaccacaactggctaatttttttgttttgttttgagacggagtcttgctctgtcaccaggctggagtgcagtggcgctatctcaactcaccgcaacctccgcctcccaggttcaagcaattcccctgcctcagcctcccaagtagctgggattacaggcacacgtcaccatgcccagctaattttttttttattttagtagagacagggtttcaccaggttggccaagatggtctcgatctcctgacctcgtgatccgctcgcctcggcctcccaaagtgccggkattacaggcgtgagccactgtgcccagycacacctggctaatttctgtatttttagtagagacggggttttgccatgttggccagactggtctcgaattcctgacctcaggtaatctgcctgcctcggcctcccaaagtgctgagattacaggtgtgagccactgcgcccagcccaaaattgttttcatttgtcaaattcatctagtgtttttgaatctgagaatttttaccttctatcacagagtaggcctatcttgggttcttcctggaaggagtaagtctatgtgtcctatttttgatcaactactttttaaactttgatttctttgctgttttttgttttgttttgtttttttaagacagggtctcactttgttgcccgtgctggagtgcattggtgcaaatacggttcaccgcagcatcaacctcccaggatcaagcaatccacctgccacagcaccccaagtagctgggattacaggcgcacgtcaccacacctggctaatttttgtattttctgtagagacggagtttcactatgttgcccaggctgggaactctgatttcttctttatgtcaagatcttctatcttagggggttcattcttccttatccacatataataccctgttacctgcctcagtttacctagacctgccagagtttcagcccagcatacataggttaggccactcaccttggatacctttgataatctccccagctgtaaactgatgacttctccatggagcaggggaaaaataagcacttcagtctagctcgtccttgttttccagaggcacaggctcctaatgccaaatagccatgactatttgaagtcggggtaagggagattttcctctggttcacttggaacagtgacagaatgttcctgctagcctctgaagagtattggcctcctatttaagacagcccttcaactccaactcctaactttttgttgttgttgttcctttctggccttctttgagacattttagataagactgtcctacatttcagacgttcctgtttgggccagctgaagcctagaggaggggaagaatggaagaatagttgatttacaaggttaagctctacctaagtgcccagtattaccatctatgaatacctggcattcataagtgttaacagtccagcttgtcagctatggttaactcttaaaaccataaagtttaccaaactttatgttcatcttgtgttattattattaggaagtctttcttataaaattgcattttactctgtagattagggtttatgtttattgctgatcttgactcaaaattttagaacacaaaaagcagtatcacttctataacttattgaaagcattaaaaattcccattttcatgtaatgttttatatatttgagtgaatgtatatgtcttttttaaattcctctagaaatatttgaatctttaaaattttttttactatggtccatttgggattattattattattttgagatggagttttcactcttaatgcccaggctggagttcaatggcgcaatctcagctcactgcagcctccgcctcctgggttcaagcgattctcctgcctcagactcccgagtagctgggattacaggcatgcaccaccacacccggctaattttgtatttttagcagagacagggtttctccatgttggtcaggttggtctcgaactcccagcctcaggtgatccacccgtctcagcctcccaaagtgctgggattacaggcatgagccaccacggccagccttttttttaaacaatttttaagcctttacctcggctcacggtatgcagttcagtgttatatacmttcataatgtcgtacaactatttaaatttggtatatatttttcatttccaccagcaaatacatgaggttctagtgactttgcatccttgccagcatttggtattataagtccttttaattttagacattctagtaggtatataatggtatttcactatggttttaatttgcagttttcggatcactaaagatgatgacaacattgtcttgacttactggctatctatatatttttgttagtcaagcatttgctcaaatcttttgcctattttaaaaattggattgtctgtctccttattattgaattataaaaggtgtttatatattctggatataagttctttatcagctattatatcttctcccagcctgtgccttgtctttaaagtgtctttcaaagagcagatattaattttgatgaagtccaatttacttttcatactttttgtgtcttctctaagaaaaagcctaactcaagatcacaaagatacatatataatccaaatatgtatgtaaatacataaattatatataataatgtataatatttggtaatatataatcaatatatatcatctacttttttttacatatatatttacatatacacattgagacagggtttcactgtatcattcagtctggaatgcagtggtgcgatcatggatcactgcagcctcgactctctgakctcaagtgatcctcccacttgagcctcccgagtagctgggattataggtatgtgccaccacactcagctcatttttattttatttatttattttttttttttttagggatagagtctcacatcattgctgaggctggcctcaagctcctgggctccagcagtcctcctgcctcagcctcccaaagtgctgggattataggcatgagccgttgattcaagctgatattctatgttttctttcacaagttgtaccgtttttgctatagttttacatatagatctgtgtttctacttcaagtttgtatatggtatgaggtatcagttgagagttttgtttgtttttgtttttacgtatggaaatccagttattctgtcaccgtttgttgaaatgactgtcgtttccccaccaaattattttctcaaaaatcatttgtaaaaaatcatttgaccatatatggatgatttttcaactgtatcctgtttgattaatctatatatctattcttataaaaataccatgttgtttagattattgcagttctgtagtaagtattgaaattcgattagtcttatattgagaaaactctacttagagctgaaatatttctatctgtaaattctacctattaatcctgtttatgtcctctaaaacaagattacttcctattttatctgacaattcatctatttgaacaaatgtttatacattttaatctggaccaagcctctatatgctctaaaactctgcaccttactatgtgtttgggttttttttttttaatcttcttactttataatatattagaaagtcaagcagtatttattgaagtaaaactaaactctgtggaataattcctcattagtatccttaacatatgtaccttatgttgaatgtagtgaagaaaacatagttcctgcgatcatatcattaagaaaaactatggctctcttcatcaagaaatgaatctttccagacccttgcatttatttaacttgtacctgttttttttgtttctgtttttgtttttgtttttttttgagacagagtcttgctctgtcacgcatgctggaacgcagtggtgtgatcgtggctcagtgcagtctcagcctcctgggctcaagtgatcctcccaccccagccgcccaagtagctgggaccacaggcgtgcaacaccacgtgggcctggctaattttaagaattttttgtagagacaggttttcaccatgttgcctaactactgggctcaagcgatcctcccatcttggcctctcaaagtgctgggattatagacataagacaccaggcccagcctggtttgatttttatacactggaaagttcttcatttcattatcaactttacttttgttttttatcagagttttacatgaatatagtttaaagggtcagtaactatatagttttcattgttaaaatrgctgcctcctacgctcccttaatctttctctctaccgtttcccgtatctctaaataatgtatgtatgttgaagtttttgtttttccagttttrggcattctctgttaactctccaatatggaagatgaaaaattgcctctctttgactctgcttcccacatcacacactacttctcattcttaccttctcggtatagatgtattataattttggttagataaatatttgatgttgcaagttattttttttaaacttttaggttcaggggtacatgtgcaggtttcttatactggtaaattgtgtgccatgggggtatggagtacagattattttgacatctaagtgataagcatagtacctgatcctctccctcctcccactctccaccctcaagtaggccccagtgtctgttgtttcttctttgcgttcatctgtactcatgttgataagctcccattgataagtgaatatgtggcacttggttttctgttcctttgttaatttgcttaggataacggtctctaggtccatccatgttgctgcagagtacatgatctcattcctttttatggctgtatagtattgcataatgtatatgtaccacattttctttatccagtctgttgttgatgggcatttagattgattccatgtctttgctattgtgagtagcactgtgatgaacatatgcgtgtatgtgtctttatggtagaacaatttgtattcctttagatatatacccagtaatgggattcctaggtcagatggtaattctgttttaagtactttgagaaatctccaaagtgctttccacagtggctgaactaatttacattcccacaagcggtgtataaatactcccatttctcttcaaccccaccagcatctgttattctttggctttttagtaatagccattccggatggcgtgagacagtatgtcatcttggtttggatattcatttctttaataattagtgatgttgaggatttttgcatatgcttattggccttatgtatgtcttttgagaagtgtctgttcgtggcctttgcccatctttaaatggcaaagttaaagttaaatggcaaagttaaaaacagttgtttgttttttgcttgttaacttgtttaagtttcttacagactctgaacactagacctttgtcagatgaatattttgcagatattttctcccaaaattctgtaagttgtctgtttagtctgttgattatttcttttgctgtacagaatctccttagttaattaggtcccatttgttaatttttgcttttgttgcaattacttttggaatcttcattatgaatttttttttttttttttttttttggaaacaaagtctcactctgtcacccaggctggagtgtaatgacgcratctyggctcccaggttcaagtgattctcctgcctcagcctccaagtagttgagactacaggtgcacactaccaagcccggctaatttttgtattttttagtatagatgaggtttccccatgttggccaggctggtcttgaactcctcaccttaggtgatccacctgcctctgacttgcaaagtgctaggattacaggcatgagccactgcacctggctttatcatgaaatctttgccatggcctatgtccagaattgtatttcctagattttcttctagggtttttatagttttaggttttacatttaagtctttaatacattttgagttgattttcttgtatgatcaaaggaaggtatccagtttcaatcttctacatatggctagccagttatcccagcaccatttattgaataagtgttccttaccatgttgcttatttttttgttaactttgttgaagatcagatagttacaggtgtgaggccttatttctggactttctattctgttccattggtctatgtgtctgtttttgtgccagtaccatgctgttttggttactatagccttttagtatagtttgatgtcaggtaacatgatgcttccagctttgttctttttactttgaattgccttgagcattcaagcttttttttggttccatatgaattttaaaatagctctttctaattctgtgaagaatgtcattggcagtttcataggaatagtattgaatctgtaaattgctttaggcattatggctgttttacaatattgattcatcctattcatgagcatggaacgtttttccatttgcttgttttctttgagcagtgttttgtcattcttgttgttgagatctttcacctcccttgttagctgtattcctaggtattttattcttcttgtggctgttgtggatggattgggctcttgatttggcactcagcttggacattgtttgtgtatagaaatgctgttgatttttgtacattgattttgtatcctgtggcgttgcttaagttgttcatcagatctaggagcttttgggagagacaatcgagttttccaggtatagaattatatcatctgcaaatagagatagtttgactctttctcttcctacgtggatgctttttatttctttctcttgcttgatttctctggcgaggacttctagtattatgtggaataggagtggtgagagtgggcatcttgtcttgctctggttctaaaggggaatgcttccagcttttgcctattcagtatgatgttggctgtgggtttgttgtagatggctcttattattttgaggtatgttactttgatgcctagtttgttgagagtttttaatgtgaagtgatgttgaattttattgaaaaccttttctgtatctattgagatcattatgtggtttttgtttttagttccgttgatgtggtgaatcatatttattgatttgcacatatatatatatatatatatatatatatatatatatatatatatwtttttttttttttttttttttttttttttttttgagacagagtctctctctgtcacgcaggctggagtgcagtggcaccatcttggctcgctgcaagctccgcctcctgggttcatgccattctcctgcctcagcctcccaagtagctgggactactggcgctcaccaccaagcctggctgaatttttttgtattttttagtagagattgagtttcaccatgttaaccaggatattctccatctcctgacctcgtgatccgcccgccccagcctcccaaactgctgggattacaggcatgagccaccgtgcccggccaatttgcatatattgaaccaatcttgcatcccaaggataaagcctacttgatcatggtagattagcttttgatgtgctgctggattctgtttgctagtattttgtcaaggatttttgcatctgtgcacatcaaggatattggcctgatattttgttgttgttgttgttgttgtggctctgccaggttttggtattaggatgatgctggcctcatagaatgagttagggaggagtccctccccctcaattttttggtatagttttagtaggaatagtgccagctcttctttatacatgtggtagaatttggctgtcaattcttctggtccagggctttttctgcttggtaggctttttattactgaatcagttttggaactcatcattggtcttttcagggatccagtttctccctggcttaatcttgagagggttgtatttttccataaatttatctatttcttctacgttttctagtttgtttgctgtcagtaatagtctctgagggttttttgtgtatgtgtggggtcaatggtaatgtcctctttgtcacttctgattgtgtttatttggatcttctctttttttctttatcagcctagctagtggtctatctatttattctttcaaaaaacyaatccctggattcattgatcttttgtatggtttttttttcgtatctcaatttccttcaattcagctctgactttggttatttcttgtcttctgctatccttggggttggtttgctcttgtttctctatttcctcttggtgtgatgttaggttgtttatttgagatctttataactttttgatgtgggtgtttagcactgtaaacttccctcttaacactgctttagctggattccagagattctggtatgttgtatctttgttctcattcatttcaaagaatttctttcttgacttctgctttaatttcattttttacccaaaagtcattcgggagcaagttgtttaatttctgtcatttacagttttttgattatggaaaaatctactcacagcagagccatgtagcctactgtcatttctttttcttacacaatattttcatcttctggagttagtaattggtttattcacttgcttaactttgtatgttttttattattaattaaacccaaactaacttctacttgggtaaatctcttctcaatactttcagacacattaagtattctatcatttttatcttttagatgtctcgtccagaaacttctgaccttttcagtacaatttgttgctgggtatgctgcgtagctattgttttgtttttttctttacctcatcatcctggagattttattcaccactcttgtgttgaatttcagggagctaatattgcatgaaaaatgctttgagagccttgcatgtcttaaaatgtttttatttcactctaacatttgattaacagtacaactaggtatataatcctggcctataaatttttttttctcagaatttgtaggcattgctccctctgccgtctagtttttggaattcctcttcaaatccattgactttatatgctccatatttttctaagctttcttgttctgatacctcatcatttgtatgcagtcttttgtataattggtaccttttgtrtgaaacctttttctggaagcttttaggatctcctgttttcctcattgttctgaaattttgtaggagtggctttagggttagagttattttcagactttgtgctgggcactggttcgacccattgaatawagaaactaatttcctttcatttggggattttatgtatttattcatttattttgagatagagtcttgcactgtcacccaggctggagtgcagtggcacaatactggctcattgcaacctctgcatcccagtttcaagtgatacacttgcctcagcctccccaggagctgggattacaggtgccttccaccatgctyggctaatttttgtatttttagtagagatagggtttcaccatatcggccagtctggtattgaatgcctgacctcaagtggtctgcccacctcggcatcccagagtgctgggattacagacgtgagccactgcgcccagcctagtttgggggttttaaaagaattattaccattaatattatgtttattcttttttattttgttttctttctttctacattgttcagatattagatgtcttggaattggtcctttaatgttcttatctctttatcctctttttgagctcatctttttgctctgttttgtgaaaattttcctcaaatctattttctagtacttctattgaacttttatattaatgctattatatttaattcaaacagctctcttttgttctttgaatattttattttactagtattctcttcttgcctcatgagtgagacttctctgaaggtactaatgacaacttttcttaatttcttttctttttaaatcatcagtgttttctccgacttgcttttttaaacagagttttgcattctgtctttcatgttattagctgttcttaaatgtctagtgatccatctctgtcggcttcagtttaagatcaggacagcaaaaaggcagtcagaagcaccctgactaaatgaggttgtggggttgttgactgcagtctttgctgtagattatttggctgagttgatctcttggaggaactcttgatggtagcatattcagatcatttattgtgggctggtctgattgtctagagaagatactttcagacctttacctgaaaaatataaaactagctgttggttttctttaaattaggaaagaagcctgaaagttttcctcaaattttgtaaaacctcacctgtttctcctattttcagttcatatccccctaccctccactgtgactgttccaactctataaatcctctgggtagtagatgaaattgtgtcccctgaaaaaatgtgttgaagtcttaatccctagtacctgggaatgtgactttctttgaaaataaggtctttgcagatgtgatcaatttaagatgagaccatactggattagagtgaaccctaaatccagtgactggtggttttacaaggagaaatttattttttattttttattttttatttttttgagacagggtctcactttgtcgccaggctagagtgcagtggcacgatcttggctcactgcaacctccgcctgggttcaagcarttctcctgtgttagcctccctagtagcagggattacaggcacctgccagcacatccggctaatttttgtatttttagtagaagacagggtttcaccatgttggccaggctggtctcaaactcctgacctcaggtgatcagcccgcctcagccttccaaagtgttgggattacaggcatgatccagtgcgcctggccaggggagatagttaaacacagaaaaatacaaggaataatgctgtgtaagcagaatggcagagattagaatgatgtgcctacaaaccaaggaacaccaaggattccaggcatccaccagaagataggagagaagcatggaacagattgtcttcaaaacctccagaaagaaccaaccctgttgatatcttgattttagatttctagcctccagaactgtgagaagacaaatttattttgttttaaaccacccactttgtggtacttttttacagtagcccttggaaactaaaatactctgtttcagcctctctagagaagaaagtcagacttctaatagaatgtgagaaaactttgtatcaagtaggagacctgtaaatctaatgattttataaacttttaaccagtcattctattttcttcacatcttcacaccctctcctcctgcagtaatacctttttctgtcattttctgggctctttgggggttcatcagtgacaatcaggttgcttttctggtctgtcccctattgaagtagaattccccattcttttctgttaaggcgcttttcaagtgttcatctcctttccaccttctggaatttacttgcttttttctccttctgtcctgtgggtttatgcccccgccgcccccytgccccccgccttttttaaagaaagataccagaagaatatggcattctagaagccaagtaaaaatattttcaaccagcagacaatgaacaactgtagcaaatgatgctgagaagtctaataaaatgaggactgagaaatgaccatttgatttggcaagatatatcattcatggctttgacgagtaactgtgatggagtagtaggggataaagcctcacttgagtgggttcaagagagatgagaggaaaggagaaacagtgagtatagattactgtctcaggaatttatcttataaggggagcagaaaaacgtagctgtcaggaaaactggggtcaagagaattaaaaaaagatagaatagaatagacaacccagtaagtgttttattgactctacgaatgtgacaccttgcaggcagataaaaatgtgattcaggaatttagaaatcaatccaagacaatgaataaaaataagaagctatgcatgaagataatgataaatgtagaaataaatagggttytcatgtgtaaattgtagagagatgaaggaaattttgcatggccagaaccttgggaaacattcttttagaaagcaaaaaaaaaaaaaaaggaaaaaaaaaagaaataaaagtattcaagaaggaggagaacaagaagccaaagggaaagacattaaccacagagtaaatgggttgacaatataaaataccacaaagatgttgcaaaagaagagggctaaaaggccaccgtactaactaatgatcaggtcacttgtaaacatcattaaaaaatggttaaggagattgtagatagtgaaaaatggaagcaacagatatagagtagtcagagaggaattttggtagcaaagaaaagtttaaaaatagggcaggagctgtggaatatgttggaaatctggaagagggaggaaggagtcaacagtgagaaagaaattaagaaagatgactaatggaagctttaaagtgctactataaaagggggaaaatatggctaataatactttttactttatagaaatttcataccatatttgactacaaatgaagtctactttgtaaaaggaggcctctccataattacagttatccatggaaataaaaattgctttttttcttcattggaaaatgtcaaataggatctgagttatagggtttttaacctgcagctaaaaagaaaacttccttcattaaagacaatccattgtatttgccaaatctggtttggtgtgccaacagctacacaattctatcagaattttacaagcagttcagttttccatagttacaagaartaaattatattctttgtttcaaattcattgttaattgcttcaattgtaatttatccagcttgactgcagacttcaaaaagcagcttttcatttcagagtggtttccagaaccttgaggctccttacattaatcatccacttacaatatcaatacatatagactccagtgtttccagcagccatatctttggatgcacatactcggtgtttactatttttaatccaaattctgatacagatagaaaatagaaaagtaaacagcattatattttcctgagaatcattttaaacaccagctaaattactgaagacccatagaactgaacaatatgtatctagcctaaaattttcctttaatttctttacataaaaacatctttttctatagtacttatatctcttttgaataaattatattgatataaagaaaacaagaaaactctccaaaagaatattttgattattccgagaatttaatgaggtgcacagatataagaagagcactcttactctctttggaatcctaagtacaggattcaggacatgaaaacagatctactttatcaattaccatgcacacttcagcctcagaagtaggatattagctcaaagacaattagccccatttggacattcatatgtagtctgtccttagttaggaatgaatcacaacctattcttttatatggtatatttgaccaacactagcttaattaacattaatttaataaactcccctactacctcaccatagactaagttacaaagatcctgggttcagtggaccaagtcacaacatatttttcagccacggtgatgtctaaaaatatttttccttaaactgtaaaacaagtgcaacatgataaaatggcctttatttatcagttttaattttattaattttttgaattgatgataaatccacatgtataccattaaagagatacaaaagtggaaagtctctctctaatccctattcctcaggagtgccccagatactggcaactctggaggcagaaagttactaatttgttgtgtagccttctagaaatatcctctataagttwtatatatatatatatatatayatatatatataaatctaagatatatatatgtatcttacgtaaaayctaaaatgtacacaaaaggtacatatatatggagagttaaaggtacatatatatgtatatggcgagagagcgagttaaagtttccaaaatcaaaacaaattctattgtgttaaaaaccctatcaaagacaaaacctaacaaacagagccagggaaggctgttaagggaggattcttagacacaaatgcctgataacaacaactaccaccaaagactgcaaaaaccacaactttgcacaaaggccatccaaccttatataaaataatacttctgggtattctgggtacactgcctatggggtagccctgctctgcaaggagcagtataattttttttatttaaggaaaaaaaaaaaaaacctttgtgaggacatgtgcccagcaactatctttagactggtgccatccttgttactgattcccgtggccaaggatagttatctcaaaacaatttctcgtttagaacttgtatatgggtgcaatccttattttacccttaaaaacccttgttttctgttacctccctacagatgcatacagtttactatggcatgcatattcccatttcagtgcctatttccaaataaacatgattttctctcagagtcttcctgttatttaggttatctttctctctctctttctctgtacacacacacacacacataaacacacacacacacgtgtgtatgtcacatataacctacgattgatttatacctttcctaatcttatgtaaaatccaaaatgtacacaaaatagtattgtaacatcatgaaaactaagaaaaggaaaactttggttgaaaataagaaaaaaaaagsctaggtgcggtggctcaggcctgtaatcccagcattttgggaggttgaggcgggtggatcacgaggtcaggagatcgagaacatcctggctaacatggtgaaaccccatctctactaaaaatacaaaaaattagccggacgtggtggtgggtgcctgtagtcccagctactcgggaggctgagacaggagaatggcgtgaacccgggaggcagagattgcagcgagccgagatcgcaccactgcactccagcctgggtgacagarcgagactccgtctcaaaaaaaaaaaaaaaaaaaaaaaaaaaaaaragagaatccttatttttcattactttggcaagtgacaggtatatatagttaggaaaaccttcattgtcaactctcatctatctcagcctctttgtagtgtctcaggaggaaccactgcttcctagaaaagctcctctgggcccctcagcttttctgattcttctttaagctctcatctctgcctcttttcctagtacctcctcctctgcccaccgtcttcagtgttgagtctttcgtcattttcagttcttgtttcacctaaattcctgaggctatcatccattctcatagttttaagtaccacccatatataagtcctaaatgtgtacatttggctcttagcatatgctccagatccaaacttaatagctccttttggacttttttcctgtatattctgaggctattatgacatacaatgcatgttgatatttgaaactaaagctaattaagccctagatttwaaaaaaaaacctctaaatgcattaaacatttgagtctgtgattcttattcttgggccagaagtttgtttaaaataaaaactacaaaacaatagtatagtcatcccttggtatatgcaggagattggttctagtactccagtggatacgaaaacccacagatgctcatgtccttcatgtaaaatggcatagtatttgcacataacctacatatgtcttcccatatactttaaattatctctagattacttataatgcttaatacaatgtaaatgctatgtaaataattgttatactgtattttttatttgtattgtttttactatattttttgttgtttgtttttattattattatactttaagttttagggtacatgtggacaatgtgcaagttagttacatatgtatacatgtgccatgctgctatgctgcacacattaactcgtcatttagcattaggtatatctcctaatgctatccctccccgcttcccccaccccacaacagtccccggagtgtgatgttctccttcctgtgtccatgtgttctcattgttcaattcccatctatgagtgagaacatgcagtgttcagttttttgtccttgcgatagtttactgagagtgatgatttccaatttcatccagtccctacaaaggacatgaactcatcactttttatggctgcatagtattccatggtgtatatgtgccacattttcttaatccagcctatcattgttggacatttgggttggttccaagtctttgttattgtgaataatgccacagtaaacatacgtgtgcatgtgtctttatagcagcatgatttatagtcctttgggtatatgcccagtaatgggatggctgggtcaaatggtatttctagttgtagatccctgaggaatcgccaccctgatttccacaatggctgaactagtttacagtcccaccaacagtgtaaaagtgttcctatttctccacatcctctccagcacttgttgtttcctgactttttaatgattgccattctaactggtgtgagatggtatctcattgtggttttgatttgcatttctctgatggccagtgatgatgagcattttttcatgtgtcttttggctgcataaatgtcttcttttgagaagtgtctgttcatatcctttgcccactttttgatggggttgtttgtttttttcttgtaaatttgtttgagttcattgtagattctggatattagccctttgtcagatgaatagattgcaaaaatttcctcccattctgtaggttgcctgttcactctgatggtagtttcttttgctgtgcaaaagctctttagtttaattagatcccatttgtcaattttggcttttgttgccattgcttttggtgttttagtcatgaagtccttgcccatgcctgtgtcctgaatggtattgcctaggttttcttctagggtttttatggttttaggtctaacgtggtaagtctttaatccatcttgaattaatttttgtataaggtgtaaggaagggatccagtttcagctttttacatatggctagccagttttcccagcaccatttattaaatagggaatcctttccccattgcttgtttttctgaggtttgtcaaagatcagatagttgtagatatgtggcgttatttctgagggctctgttctcttccattgatctatatctctgttttggtaccaggaccatgctgttttggttactgtagccttgtagtatagtttgaagtcaggtagtgtgatgcctccagctttgttcttttggcttaggattgacttggcgatgcgggctcttttttggttccatatgaactttaaagtagttttttccaattctgtgaagaaagtcattggtagcttgatggggatggcattgaatctataaattaccttgggcagtatggccattttcacgatattgattcttcctacccatgagcatggaatgttcttcgatttgtttgtatcctcttttatttcattgagcagtggtttgtagttctccttgaagaggtccttcacatcccttgtaagttggattcctaagtattttattctctttgaagcaattgtgaatgggagttcactcatgatttggctctgtgtttgtctgttgatggtgtataagaatgcttgtgatttttgcacattgattttgtatcctgagactttgctgaagttgcttatcagcttaaggagattttgggctgagacgatggggttttctagatatacaatcatgtcatctgcaaacagggacaayttgacttcctcttttcctaattgaatgccctttatttccttctcctgcctsattgccctggccagaacttccaacactatgttgaataggagtgatgagcgagggcatccctgtcttgtgccagttttcaaagggaatgcttccagtttttgcccattcagtatgatattggctgtgggtttgtcatagatagctcttattattttgagatacgtcccatcaatacctaatttattgagagtttttagcatgaagggttgttgaattttgtcaaaggccttttctgcatctattaagataatcatgtggtttttgtctttggttctgtttatatgctggattacatttattgatttgtgtatattgaaccaaccttgcatcccagggatgaagcccacttgatcatggtgggtaagctttttgatgtgctgctggattcggtttgccagtattttattgaggattcttgcatcaatgttcatcaaggatattggtctaaaattctcttttttggytgtgtctctgcccagctttggtatcaggatgatgctgacctcataaaatgagttagggaggattccctctttttttattgattggaatagtttcagaaggcatggtaccagttcctccttgtacctctggtagaattcggctgtgaatccatctggtcctggactctttttggttggtaagctattgattattgccacaatttcaggtcttgttattggtctgttcagagattcaacttcttcctggtttagtcttgggaaagtgtgtgtgtcaaggaatttatccatttcttctagattttctagtttatttgcgtagaggtgtttgtagtattctctgatggtagtttgtatttctgtgggatcggtggtgatatcccctttatcattttttattgcgtctattwgattcttctctctttttttctttattagagttgctagtggtctatcaattttgttgatccgttcaaaaaaccagctcctggattcattaattttttgaagggttytttttytgtctctatttccttccgttctgctctgattttagytatttcttgccttctgctagcttttgaatgkgtttgctcttgcttttctagttcttttaattgtgatgttagggtgtcaattttgggtctttcctgctttctcttgtgggcatttagtgctataaatttccctctacacactgctttgaatgtgtcccagagattctggtatgttgtgtctttgttcccgttggtttcaaagaacatctttatttctgccttcattttgttatatacccagtagtcattcaggagcaggttgttcagtttccatgtagttgagcagttttgagtgagattcttaatcctgagttctagtttgattgcactgtggtctgagagagagtttgttataatttctgttcttttacatttgctgaggagagctttacttccaagtatgtggtcaattttggaataggtgtggtgtggtgctgaaaaaaatgtatattctgttgatttgggatggagagttctgtagctgtctattaggtccacttggtgcagagctgagttcaatccctgggtatccttgttaactttctgtctcattgagctgtctagtgttgacagtggggtgttaaagtctcccattattattatgtgggagtctaagtctctttgtaggtcactcaggactcgctttatgaatcgggatgctcctgtattgggtgcatatatatttaggatagttagctcttcttgttgaactgttccctttaccaccatgtaatggccttctttgtctctcttgatctttgttggtttaaagtctgttttatccgagactaggattgcaacccctgcctttttttgttttccattggcttggtagatcttcctccatccttttattttgagcctatgtgtgtctctgcacgtgagatgggtttcctgaatacagcacactgatgggtcttgactctttatccaatttgccagtctgtgtcttttaaatggagcatttagtccatttacatgtaaggttaatattgttatgtgtgaatttgatcctgycattatgatgttagctggttattttgctcattagttgatgcagtttcttcctagtctcgatggtctttacattttggcatgattttgccacggttggtactcgttcctttccatgtttagtgcttccttcaggagctcttttagggcaggcctggtggtgacaaaatctctcagtatttgcttgtctgtaaagtattttatttctcyttcacttatgaagcctagtttggctggatatgaaattctgggttgaaaattctttyctttaagaatgttgaatattggcccccactctcttctggcttgtagagttggttggtttaatccacagatacaaaacctgtggaaatagagggctgagtttatcttggttgcgtatcaaattagtctgttgcatttctgtaaaagcttaaagtagactcttgttaactagcatataattataaataccctagatctctgtactcagtttcctagtctcatgtgtttttgtgaaaatcactaagccaattaaaccaagctgtgatcaaatgaggagagatagtactttgtaaatggaaaagtatcttawaacctttgttgctgttgtcagtaaataaatactcacaacagatataaggaagttacagaggatggtagcttcaaatgtagccattataaactgaaggaaatgtgattggccttaaaacctggttttgtaaatactttgaattaggatgttgtacaataacagaaatacaactcaaaatggcttaatcactaaagagaccacataacacgtaagagagggatagatctaggattggttgattcactagtctattcatgtcatctttctactttgtcatccttagcagctctagacatcatatccttactcagcaatgttcagaagcacgtggaaggatatatccgaagtgtcctaaagtgtcttaatagggaagaaagaggagaaaagctttatgtgaagcagcctatatttgcaacatatgttataactttgaaaaactagttaaaataacattcagtgttttgttttgttttagttctttttacctattatgaaacatcagtaatatacaggaaagacatgaaagcttgtaataatttcaaggtacataatagatccagagtaatacaaataaatccttgtgtattccaaaaacctaatgaatttttaagaagaactgccttttctgttcataagctttaaaaaaattaaactagtgtctaatgcttgataatatcttgaaaatatgcttcattagtctgattccattagcagaaaattgccctataactttcactaatgaagaacaaaacaggaaatagtctctgcatcttactagatggtttaaaaaaggtatacctcagctgttttgagagaatttattattttcaggatgtataataattcccactgagccattatttcrcacattagcttttacacaattatttattcttattcataaaactgcagatcaaaaaacttgattatgcctgcaggaactagtagaaaatttttagggcttaattagataataatattcattagaatattttgtagttaaaaacgaaaatatattttatataaaaaagcaacaaaaagtaagccaggtctacttgatctagtttataattattttataagtagtaaaaatgacttacaatattaaaatcacttcattaataaaaatgtggatatacttgataactcaatgttgatagatggaggaataagtgaaatagttttgttacaaactgagtgcctctcagaatataacgtgacaccattttgtctactaatcagctgtaggtgaagcagcccatgtctagcccatatttartctagttgttttgatttattgaattatatgctaaaaaacctgagcatttctgttatagtctctatattgtggacatgtagaggttacagcaagtatatatcaaaaatttttttcaatttttgtagccatcaaatacacattattatttatttagtcattcacaaaacatacctttgagcatcaagcacagtgctaagcccttagtttaagtaagagataaccgtataaacaaataagtgtaccaaatgttactgatgttatggtataagtttattcagaggcagaagaagggtgcagtcacttcttttttaaaaaattatagattcagaggggtacatgtatgggtttggtacataggtatattgcgtaatgggagggtttgggcttctggtgaacccatcacccaaatagtgaacatactcaatagtttttcaacccttgcccgcctttgcctctacccccttttggagtccccagtggccattgttcatttttatgtgtacccattgatcagctcccacttataagtgagaacatgaggtatttgattttctgcttctgagttattttaatttcagtaactattaggataatgatctccagttgcaggcatgttgttgcaaaggacatcgttttgttcttttttgtggtaatattccatggtgtatatatactaaattttctttattcagtccactgttgatggacacttaggttgattccatgactttgctattgtagatagtgctgtgataaatatatgagtgcaggtgtcttcttgataaaacaatttcttttgctatggataaatacccagtagtagggtttctgatttgagtggtaattctatttttagttctatgagaaaactccttactgctttccatcggggttgaactaatttacactcacctcccccctcagcagtgtataagtgttctcttttcttcatattcttgccaatatctgttatatatgttttcttttttttgagacagggtctcactctgtcacccaggttggtgtgcagtggcatgatagggcttaccacagtctcaacctctggggctcaagcagtcttcccacctcagcccccaagtagctgtgactacwggtgtgcaccatcacgcccagataattttttgtaattttaatagagttggggtttcaccatgttacctaggctggtcttgaactcttagactcaagcagtctgcccacattggcctcccaaaatgctgggattacaggcatgagccaccacacctggcctattttttgacttctttatgatagccattctgactggtgtgagatggtatcttattgtggttttagtttgcattcgtcaaatgatagtgatgttgagcattttttcatgttttttggcaacttgtatgtcttttgagaagtgtctgttcatgccctttgcccacttttcaatggggttgttttctccttgttgattcgttccagttccttatagagtctagatattagtcctttttcagttgcatagtttgcaaatattttctcccattctgtaggtcatctgtttactctgttgattgtttcttttgctgtgcaagtcccatatacctattttttgttctgttgcatttactcttgaggtcttaatcataaattctttgcctagtccagtgtccagaagagattttcctagattttcttctaggaattttgtagtttgaggtcttacatttaagtatttaaaccatcttgagttaatttttatatatggtgatatgtagagttccagtttcattcttctgcatatggctagacagttatcccagtaccatttattgaatatagagtcctttccccattgcttgtttttgtcagctttgtcaaagattaggtgcttgtagttgtgtggccttatttcagggctctctatcctgttccattggtctatgtgtctctttttgtaccaatatcatgctgttttggttactgtagccctgttgtatagtttgaagttgggtagtgtgatgcctccagctttgttctttttgcttagaattaccttggctattggggctcttttttgtttcatatgaattttaaaatacttttctctagtcctgtgaagaatgccattggtagtttgataggaatagcattgaatctgtactttgctttaggcactgtggccattttaatgatattgattctttgtgtccatgagcatgagatgtttttccatttgtttgtgtcatctatgatttctttcatcagtgtttcatacaaagttctccttatagagatctttcctttcactaccttagttaaatgtattcctaggtattttattttgtgtgtgtggctattgtaaatgggactgaagtctttatttggttttcagcttgaacattattggtgtatagaaatgctactgatttttgtatgctgattttgtatcctgaaacattactgaacttgtttatcaggtctaggagtcttttggaaggatctttagggttttcaaggtgtaaaatcatgtcatcagtgcaaaaagataattcgagttcctctttttcggatgctttctatttctttctcttcctctggctgggacttccagttctgtgttgaatgggagtggtgaaagtagacatcttagtctcgttccagttcttcggtggaacactttcagcttttccccattcagtatgatgttggctgtgggtttgtcatagatggctcttattattttgaggtatatccctgatgcctaatttgttgagagtttttttttatcataaagcgatgttggattttatcaaatgctttctcagcatctatgaagatgatcatgtgttttttgtttttaattctgtttatgcagtgatattgtttggatatcttctccaaatttcatgttgaaatgtaatccccaatgttggagttaaggcctggtgggagatgtttggatcatgagggtggatcattcatgaatagcttggtgctttcctcacaatagtgagttcttgtgagacctggttgtttgaaagtgtgtgacacctccccactcactctcttgctcctacatttgccatatgatgtgtctgctcctccttcacctcccactatgattgtaagtttcctgtggccctcaccagaagcagatgccaacaacatacttattgtactgcctgcagaaccatgagccaactaaactgcttttctttataaattactgagcctcaggcatttctttttcttttttttttatactytaagttctagggtacatctgccaacgtgcaggttagttacatatgtatacatgtgccatgttggcgtgctgcacccactaatttgtcatttaacattagatatatctccaaatgctatccctcccccatcccccgaccccacaacaggccccagtgtgtgatgttccccttcctgtctccatgtgttctcattgttcagttcccacctatgagtgagaacatgcagtgttcagttttttgtccttgcratagtttgctgagaatgatggtttccagtttcatccatgtccctacaaaggacatgaactcatcactttttatggctgcatagtattccatggtgtatatgtgccgcattttcttaatccagtctatcattgttggacatttgggttggttccaagtctttgctattgtgaatagtgccgcaataaacatacgtgtgcatgtgtctttatagcagcatgatttataatcctttgggtatatacccagtaatgggatggctgggtcaaacgttatttctagttgtagatcccttaggaatcgccacgctgatttccacaatggytgaactagtttacagtcccaccaacagtgtaaaagtgttcctatttctccacatcctctccagcacctgttgtttcctgactttttaatgatcgccattctaactggtgtgagatggtatctcattgtggttttgatctgcatttctctgatgagcagtgatgatgagcattttttcatgtgtcttttggctgcataaaygtcttcttttgagaagtgtctgttcatatcctttgcccactttttgatggggttgtttgtttttttcttgtaaatttgtttgagttcattgtagattctggatattagccctttgtcagatgggtagattgcaaaaattttctcccattctgtaggttgcctgttcactctgatggtagtttcttttgctgtgcagaagctctttagtttaattagatcccatttgacaattttggcttttgttgccattgcttttggtgttttagacatgaagtccttgcccatgcctatgtcctgaatggtattgcctaggttttcttctagggtttttatggttttaggtctaacgtggtaagtctttaatccatcttgaattaatttttgtataaggtgtaaggaagggatccagtttcagctttctacatatggctagccagttttcccagcaccatttattaaatagggaatcctttccccatttattgtttttgtcaggtttgtcaaagatcagatgactgtagatattcggcattatttctgaggtctctgttctgttccattggtctatatctctgttttggtactagtaccatgctgttttggttactgtagccttgtagtatagtttgaagtcaggtagtgtgatgcctccagctttgttcttttggcttaggattgacttggcgatgcgggctcttttttggttccatatgaactttaaagtagttttttccaattctgtgaagaaagtcattggtagcttgatggggatggcattgaatctataaattaccttgggcagtatggccattttcacgatattgattcttcctacccatgagcatggaatgttcttcgatttgtttgtatccttttttatttcattgagcagtggtttgtagttctccttgaagaggtccttcaygtcccttgtaagttggattcctaggtattttattcttattgaagcaattgtgaatgggagttcactcatgatttggctctctgtttgtctgttattggtgtataagaatgcttgtgatttttgcacattgattttgtattctgagactttgctgaagttgcctatcagcttaaggagattttgggctgagacgatggggttttctagatatataatcatgtcatctgcaaacagggacaatttgacttcctcttttcctaattgaataccctttatttccttctcctgcctgattgccctggccagaacttccaacactatgttgaataggagtggtgagagagggcatccctgtcttgtgccatgttttgaagggaatgcttccagtttttgcccattcagtatgatattggctgtgggtttgtcatagatagctcttattattttgagatacatcccatcaatacctaatttattgagagtgtttagcatgaagggttgttgaattttgtcaaaggccttttctgcatctattragataatcatgtggtttttgtctttggttctgtttatatgctggattacattcattgattttcgtatgttgaaccaaccttgcatcccagggatgaagcccacttgatcatggtggataagctttttgatgtgctgctggattcggtttgccagtattttattgaggatttttgcatcgatgttcatcagggatattggtctaaaattctctttttttgttttgtctctgctaggctttggtatcagaatgatgctgacctcataaaatgagttagggaggatcccctctttttctattgatggaatagtttcagaaggaatggtaccagctcctcgttgtacctctggtagaattcggctgtgaatccatctggtcctgggctttttttggttggtaaactattaattattgcctcaatttcagagcctgtttttggtctattcagagattcaacttcttcctggtttagtcttgggagggygtatgtgtcaaggaatttatccatttcttctagattttctagtttatttgtgtagaggtgtttgtagtattctcctatggtagtttgtgtttctgtgggatcggtggtgatatccccttcgtcattttttattgcgtctatttgattcttctctcttttcttctttattagtcttgctagcggtctatcaattttgttgttcttctcaaaaaaccagctcctgtattcactgatttttttgaagggttttttktgtgtctatgtccttcagttctactctgatcttagttatttcttgccttctgctagatttggaatgtgtttgctcttgcttctctacttcttttaattgtgatgttagggtgtcaattttagatctttcctgctttctcttgtgggcatttagtactataaatttccctctacacactgctttgaatgtgtcccagagattctggtgtgttgtgtctttgttgtcgttggtttcaaagaacatcttgatctctgccttcattttgttatgtacccagtagtcattcaggagcaggttgttcmgtttccatgtagttgagcggatttgagtgaatttcttaatcctgagttctagtttgattgcagtgtggtctgagagagagtttgttataatttctgttcttttacatttgttgaggagtgctttacttccaactatgtggtcaattttggaatacgtgtgctgtggtgctgagaagaatgtatattttgttcatttgggatggagagttctgtagatgtctattaggtccgcttggtgcagagctgtatttaattcctggatatgcttgttaactttctgtcttgttgatctgtctaatgttgacagtggcatgttaaagtctcccatttttattgtgtgtgagtctaagtctctttgtatgtcactcatgacttgctttatgaatctgggtgctcctgtattgggtgcatgtatatttaggatagttagctcttcttgttgaacttatccctttaccattatgtaacggccttctttgtctcttttgatctttgttggtttaaagtctgctttatcagagactaggattgcaacccctgcctttttttgttttccatttgcttggtagatcttcctccatccctttattttgagcctatgtgtgtctctgcacgtaagatgggtttcctgaatacagcacactgatgggtcttgactctttatccaatttgccagtctgtgtcttttaattggagcatttagtccatttacatgtaaggttaatattgttatgtgtgaatttgatcctgtcattataatgttagctggttattttgctcattagttgatgcagtttcttcctagcctcgatggtctttacattttggcatgattttgcagcktagtttggctggatatgaaattctgggttgaaaattcttttctttaagaatgttgaatattggcccccactctcttctggcttgtagagtttctgccgagagatccgccgttagtctaatgggcttccctttgtgggtaacccccacctttgtctctggctgctcttaacattttttccttcatttcaactttggtgaatctgagaattgtgtgtcttggagttgctcttctcgaggagtatctttgtagcattctctgtatttcctgaatttgaatgttgscctgacttgctagtttggggaarttctcctggataatatcctgcagagtgttttccaacttggttccattctccctgtcactttgaggtacaccaatcagatgtagatttggtcttttcacatagtcccatatttcttggaggctttgttcgtttctttttattcttttttctctaaacttctcttctcgcttcatttcattcatttgatcttccatcactgataccctttcttccagttgatagaattggctactgagacttgtacatttgtcacatagttctcgtgccttggttttcagcaccatcaggtcctttaaggacttctctgcattggttattctagttagccatgcgtctaatttttttcaaggtttttgacttatttgccatgggtttgaacttcctcctttacctcagagtagtttgatcatctgaagccttcttctctcacctcgtcaaagtcgttctgcatccagctttgttccgttgctggtgaggagctgtgttcctttggaggaggagaggcgctctgattgttagagtttccagtttttctgctctgttttttccccatctttgtggttttatctacctttggtctttgatgatggtgacgtaccgatgggattttgctgtggatgtcctttctgtttgttagttttccttctaacagtcaggaccctcagctgcaggtctgttggagtttgctggaggtccactccaggccctgtttgcctgggcatcagcagcggaggctgcagaacagcggatattggtgaacagcaaatgttgctgccagatccttcctctggaagttttgtctcagaggagtacccggccgtgtgaggtgtcagtctgcccctactcgggggtgcctcccagttaggctactcggtggtcagggacccacttgaggaggcagtctatctgttctcagatctccagctgcgtgctgggataaccactgctctcttcaaagctgtcagacaagaacatttaagtctgcagaggattctgctgccttttgtttggcaatgccctgccccsgaggtggagtctacaaaggcaggcaggcctccttgagctgcagtgggctccacacagttggagcttccaggctggtttgtttacctactcaagcctccgcaatggcgggcgcctctcccccagccttgctgccgccttccagttggatctcagactgctgtgctagcaatgagcgaggctctgtgggcgkaggaccctccgagccaggtgcgggatataatctcctggtgtgccatttgctaagaccgttagaaaagcacagtattagggtgggagggacctgatgttccaggtgccatctgtcacccctttgtttgactagwaaagggaattccctgactccttgcggttcccgtgtgaggcaatgcctcacccagcttcggctcctgctgggtgcactgcacctactgtcctgcacccactttccgacactccccagtgagatgagccttgtacctcagttggaaatgcagaaatcacccgtcttctgcgtcgcccacactgggagctgtagattggagcggttcctatttggccatcttggctgcaccccctcaggcatttgtttatagcagtggaagaatggcctaatacatgtgtattatgcaataaggttacattgaaaaagaatggactggccaggtgcggtggttcatgcctgtaatcctcgcactttggtaggctgaggtgggtagatcacctgaggtcaggagttccagaccagtctggccaacatggtgcaacctcgtctctacaaaaaatacaaaaattagctggacgtggtggcccgcacctgtaattccagctactcaggaggctgagcaggagaatcgcttgaacccaggaggtggaggttgcagtgagctaagatygcaccattgcactccagcctgggtgacaagagcgaaactgtcttaaaaaaaaaaaagtctgggtgcagtggctaagccctgtaatcccagcacattgggaggccgagttgggtggatcatgaggtcaggagatcaagaccattctggctaacacggtgaatccccatctctactaaaaatacaaaaaattagccggacgtggtggtgggctcctgtagtcccagctactcgggagactgaggcaggagaatcacttgaacctgggagccggaggttgcagtgagccaagatcgtgccactgcactgcagcccgggcaacagagcgagactccgtctcaaaaaaaaaaaaaaaaagagagaaagaatgaactaacacgtgtatatgcaataaagtttacattgaaatattaaattattgcctcaaatcaagatgaatgaataactctagagcagtcctcgtatgtgattaatcactgaagtcatttcaaaggaaaaatattttccaaaagcctcattgtttacttaaaatttttgtaktatgttaaatatgtacacaccaaaactaggttaaaaaatttcatatacttatagcttttaggaaatattttcaaaatatgaaaaattttcaaaattaaatacaaataaggcaaaataaaaatagttcagttaacagtattaatttaatatgatagtattatttggcagatgctaaattgatgctattgaggttttatggccaaaactaatagcctcatgtctcttaaatattgaaagtttattcatatcctatacttccttttttaatgatgaggaattgagttcagctgcacataataatagctaaaatatattggactattttctcctgcagttaacaggagtttagagccacacctttccaatcttcttgtccttttctgcctagtagrtcacaaagcagctattacggttccagatttggcatcattgcgtgatgcaggaagaaaggaagaagacaaaacgacatgtgctaactgagtcaaccctattttaacaagctttctcagaatcaccacctagttatgttgactaaggcctcattggccacattttgtcatataaccacagctagttgaaaaagagattggaaaaggagaggtttagttcaccacaggccccccaccgacagggtgtgtttgtgagggggaaggggagaagggattttggaaaagcaacagcaagctctaccacaacttctaaggccgtttttatcgagggatgatttggaagcactatagccatcttcatcacataaagatcacatcaactttggggtgttattgaaatctctctcaagtaggtatctaactatgtctgcaatccgggaaagaaaaatccttcatatttgctctcataattactgataattaaagtttaaattttaaaagctaaaagaaatcagttccctcgtgagtatgatgttctccgtgcatgcacccctatgtgtctggtgatgtctcaattccacactaccctaagtccgactattgtaaaaacgtatttactcatcattctgcaataagaagtgtttaatataggtaaatgggaagggatttctcatataatcctaaatgcaaaagggaccactaaatatacataggcctgattttaaagtagttgttcagatgacccagaatatacttatggtaatattttttggaatttaatctaaatgacttaacagttaacaaagagaattctgagttccttacaagtttgtaaattactgtccgtaggccaaaccaggcccaccaattatgttgataaataaagtttttttggaacacaaccctgctcattcatttatttgttgtcattggctgcttttccggtgttagaacagagttgagtagttgtgacagacaattggcatgcatgacctgtaaagcctaaaatatttaccattagaaaaaaatgtgccaacccctgccttagaatatattggtgaacaaccttttaagaattagtgacctaaagaaagtttctggtacagtgccaaaagttatgactttagtttgatacataagacctttctattaagactagatgaagccaaggtggacagatcatgaggtcaggagttcgagaccakcctggcyaacatrgtgaaaccccatcttgcctgtatttccagctacttgggaggctgaggcaggagaaccacttgaacccaggaggcggaggttgcagtgaaccgagatcatgccattgtactccagcctgggcaacagagcacgtctccatttagagaaaaaaaaagactagacraagaaacaaaatatggatttatcagaagagtgaacacacagagtccatgccaatagggtgttatttatttatttatttatttatttttattattactatttttgagatgaagtcttgctctgttgcccaggctggagtgcagtggtgcaatcttggctcacggcaacttcttcctcccagattcaagcaattcttctgcctcagcctcccgagtagctgggattataggagcccgcttccacgctcggctaatttttgtactctcagtagagatgggttttcaccatgttggccaggctggtctcaaactcttgacctcttaatccrcctgccttggccttccaaattgctgggattacaggtgtgagccaccatacccagccaggatgtaatttaataggaataaattcaaagtcctaagttcagaattgagaaaaatacgaaaaccttttcgaaaaacaaattaggccttatacactgaaagagctacaatgacacagagatcaccagttacagaaatggtagtctcgaattgatagaatcttgtgttttgccccttccccgtgaccatgtaccaagatctttctcattcaraagcatgttattggcattccttacaaacagcactcaaacaacaactcagttataagtgaaaaacatagaatactaagcaatactaaatatttttagtaacaatactaaacatttttcatttttgtcatcatgttgtgagttaaagtgtctaaagaaaatcttctgtctaaccttgtatgcccttctcttaagaatataagtggcatgcctatgaaaagacaatgtaaaaaaaaccctccagtttatatgtgttcaccctcattccttccagggtgcagcttagtcagtcttactctaaaactttagcctgtgatcttatttcctataacattgttcatattttaaaaacctgtgaatttttgtcgatggcatacttaatatgttgccacccattgaatgtacactttaatactatctgaggttgtagttttaaaacactgtatttctgatctataattcacatatgcttataaattcatagacttctagaaggatacataagaaagcaggtccagaggttgcttctcggaaggggcctggggagctgggagaccaggtgacagggkgaagagaaacatttcactgtatattctattgtgcctttttactgttggtccatgtacatgtatggccgttcaagtaaatcaatgaaatatcttttaaaacccatatcttctccagaatcatcatctaacctaggcgtagttcatttgcaaatcacactatcatcacagtcacactatggatgtgaaacagccaaccaaagcaactatgacaagccaaagattcaacaagtgtactgaacacagtgtgattaggtggttgtcatcacttagggaaaatactttaattggttggataggtatatgaaaacccagtttacacagaaatccaaggagaactgatcaataaaaaaagtgacaaaatgctgggtgcagtggctcacgcctgtaatcccagcactttgggaggccggggctggcggatcacgaggtcaggagatcgagaccatcctggctaacacagtgaaaccccgtctctactaaaaatacaaaaaaaaaaattagctgggcatggtggcgggcgcctatagtgccagctactccggaggctgaggcaggagaatggcgtaaacccaggaggcggagcttgcagtgagccgagatagcgccactgcactccagcctgggcgacagagcaagactccatctcaaaaaaaaaaaaaaagtgacaaaagaaatggtttttgtttgttcaaaggaggtagaaaaaaagagtaagggcaaaaagatacaatgaaatgtgcagctcaagacttgatacctttaacagtggaagtcaggagtcagaagctagtagatgaaattaagaacaggcatgtagggccaggtgcagtgactcacacctgtaatcccagcactttgggaggccgaggcaggcagatcacgaggtcaggagatcaagaccatcctggctaacacggtgaaaccccgtctctactaaaaaaacaaaacaattagccgggtgtggtggcgggcacctatagtcccagctacttgggaggctgaggcaggagaatggcgtgaacccgggaggcagagcttgcagtgagcggagatggcgccactgcactccagcctgggtgacagagcgagactccatctcaaaaaataaataaataaataataagaaaaacaaaaagaaaaagaacaggtatgtaaaacgtggagagcaaatggacatgatccttattgctgcaattctccaaagatatgtagttcataaatgtgcaagatatggagaaacagccacttctgctacatatgcagacaatgaccctaagtatgtgtctcctccttgtatatgttttgggggaggagaggtaagggaaagggttacatggtaactttcagctttcctcttgatctagggctgtaaaagcagcagaatactgtagcttattgaaagcacagcaagcaggacatttccagagtgtagcagaaagcaggcatggaagcccactgtatccctagcatgtattcacagttaccaatggaaacaatggttacttttagtagccctcctgctaaaataacttaaattagaaatgggttcttggctgaagaaattaagcaatatttctggttaaaaagttttaagaagaagaggagctacatgagcatgttcaaatgccatctttaactataatagaaatcttccttatttcttcaacaggatatacccatcctaaagtgaaaataaaaggtttttcttttcttttcttttcttttttttttttttgagtcagggtctggctttcttgcccaggctgaagtgcagtggtacgatcatgcctcactgcagattaaacttcctgggctcaagtagttctcctacctcagtctcccaagtagctggggctagaggcacacaccaccacacctgcctagttttttatttttagttttagtggagaggaggtctcgctatgttgcccacgttggtctcagattggtacgctaaagtgatcctcccacctcagcttaccaaagtgctggggttataatcatgagccaccttgtccrgtctcttggttttgtttgtttttgtttgtttgtttagatgcagtctcactctgttgcccaggctggagcacagtagcatgataataatagctcactacagactcaatctcctgggctcaagggatcctcctgcctcagcatccctagtagctgagactacaggcgtggataacacacctggctaatatttttaaattttattttaaattttttcttttttgtttttgtgggtacagagtaagtgtatatatttatggggtacatgagctattttgatacaggcatacaatgcataataagcagatgtatcacctcaagcatttattcattatgttacaaacaatccaattatattgttttaattattttwaaatgtacaatttaattattattgactatagtcaccccgttgtgctattgaatactagatattattcattctatttttatttacccattaaccatcccgactttccccctaccccaccactacccttcccagtctctaataaccatcattctattctctatctccatgagttcagttgtcttaattttggattcccacacataagtgagaacgtgcaaagtttgtctttctgtgcctggcttatttcacttaacataatgacctctagttccacccatgttgttgcaaatgacaggatctcattcttttttatggctgaatagtactccattgtgtatatgtaccacattttctttatctcttcatctgttgatggacatgtaggttgtttccaaatcttggctattgtgaatagtgctgcaataaacatgggagtgtagatatctctttgatatactaatttcctttcctttgggtatatacctagcagtaggattgctggatcagatggaagctctatttttagtttttgtgaggaacctccaaattgttccccatagtggctatactaatttacattcccaccagcagtrtacaagtgttcccttttctccatatccttgtcagcatttgttgttgcctgtctttcattttaactggggtgagatgatatctcattatagttttgatttgcatttctctgatgatcaatgctgtcgagcacattttcatataactgtttgccctttgtatgtcttcctttgaaaaatatctattcagatcttttgtccatttaaaaaattggattattagatttttttcctgaagagttgtttgagcttcttctttattctggttattaatcccttgtcagatggatagtttgcaaatattttctcccattctgtgggttgtctctttactttgtggattgtttccttttctgtgcagaagctttttaacttgatgtgatcccatttgtccattttatttggttgcctgtgtttgtgggttattactcaagaaatctttgcccagccaggcaccgtggttcacccctgtaatcccagcactttgggaggccgaggcaggtggatcatttgaggtcaggtgtttgagaccagcctggccaaaatggtgaaaccccgtctcaactagaaatacaaaaattagccgggcgtcgtggtgtgcgcctgttgtcctagctactcaggaggctgaggcatgagaatcgcttgaacgtgggaggcagaggttgtagtgagccaagattgcaccactgcactccagcctgggtgacagaatgaaactgtgtctcaaaactaaaaaaaattaaaaaaaaaaaaaaaaagaaatctttgcccattcttgtgtcctggagtatcgcctcagtgtttccttgtagtagtttcatgatttgaggtcttagatttaagtctttaatccattttgatttgatttttgtttacggtgagagatggtttaattcttctgaatgcagatatccagttttcccagcaccatttattgaagagactgccctttctcccagtgtatgtttctgacagctttgtccaaaatgagttcactgtagatgtatggatttgtttctcggttctctattctgttcctttggtctgtgtgtctgtatttatgctagtaccttgctggtaacaatagctctgtagtataacttgaagtcagataatgtgattcctccggttttgtttttgctcaggatggctttgactattctgggtcttttgtggtcccatataagttttagaattgttttttctgtttctgtgaagagtgtacttttttttttttttttttttttgtagagacaaggtcttgctatgttgtccaggctgatctcaaagtcctgcgttcaagcaatcctgcctcagcctcccaaagcacttcgggattatggacataagccmctacacccagcttagtatcttttacataactagacattccttctcattctcttttgctggattcttcccctctcttgacttctcattgttgtagtgctccaaggctttttttcccttgtggtaaaaaaacacaatgtaaaatttactaccttaaccattttaattttacagtgtagtagtgttaactatatcttattatgtaaggkataggtaacaactttttcatctagtaaatctgaaactctatacccagttaacatctcctcttttcctcctcccttgkctctatactcttccttcctaggtgatcacatctagtctcttgactaaaatatcatctgttttgctttagtttaatttcagcttcccatctccttacctcccttcagttttgcatattcagatttttggattatgtcccttctgtttctagtctttatttagagtgtatatggtccattaaattatcacatatcaagcttcattgcttaccagattcccttttccttttttcctatcytgaatctatgttaaggtgtttttattgtttggttattttctcaggtatttttactgaaatggtttgctttagtggtgtaattttggtaatcttgaatagccttaaatatctttttgccatcccgtaacaaatcgggggtatctcggctgagtataagattcataacttctaagctgggcatggtggctcatgcctgtaatcccagcactgtgggaggccaaggcaggcagatcatgagatcaggagtttgagaccagcctggccaccatagtgaaaccctgtctctacttaaaaaaaaaaaaattagctgggcatggtggcgggcgcctgtttacccagctactcgagaggctgaggcaggagaatcgcttgagcctggaaagcagaggttgcagtgagccgagatcgtgccrttgcactccagccaggaaaacagagtgagactccatctaaaaaaaaaaggttaataacttctgctgcttttcrtttcagttagtttagatcctgttgcattttattctagcttctagagttgatgattagaccagtaccagtcctagttttctctttatggataattgttctttctttctggacacttagaagattttttctttatttgtaaaattaatgaattttacaaggrtataatagatatttgtcttttgtctttaatccatcctgaaacttggtttcccttttcacttatccaccaaaagccagcccagagaaatttccctttattatttacttaattgttgcctctcctccatctggtgctttttctctttttgaacacctattttttgtaaaataggtcttctgggactattttcaagtctttctattccttcagtatttccatttattttgctttctgttctgtgctttaagataatccacgtactgcatcttccagtctatttatttagctgtcaataatgatcatcttaaaaaaaaaaagttcatgttctcgttttgctttgaaatctatacatgaatcttcctggaaaaaaaatcatgtttttccaagtattgctttttagttttctaatctgttggcttgtttacaaagaatgtaataaattttttactcttatatatgttttaattttcaattaaagtatttgaattttattttttgtaaagatatttattggggccaggtgcagtggctcacgcttataatcccaccagtttgggaggcctaggtgggtggatcacatgagtccaggagttctagaccaacctgaacaacatagtgaaaccctgtctctacaaataaaaaaaatagctgggtgtggtggcatacacctgtagtcccagctactttggaggctgaggtggtaggatcattagaggtcaaggctgcagtgagccgtgatygtgccactgccctctagcctgagtgacaaagggagactgtctcagaaaaaaaaaaaccaaaaaacatatttattgggtaagctgacatctttttgaacaatgaaatttcattttcatttaactgtaatgcattcattggtaatttatttactccaaatgcttaatttgttgttgttgttgttgttgtggtttttgagacggagtctcactctgttgcccaagctggagtgcagtggcatgatcttggctcactgcaacctctgcctcccgggttcaagtgtttctcctgctcagcctcccaagtacctgggactacaggggtgcgtcatcacacctggctaattttttacttttagtacagacagggtttcaccatgttggccaggctggtctcgtactcctgacctcaggtgatccastcacctcggcttcccaaagtgctgggattacaggcgttagccaccgtgcccggccatgatttgtattttatatatagaaataaatcttataagattatatgatatcaagacaactgggaataaaggaacaataaaatagaaaaagtttttttcctgccccccccccctttttttttttttgtattttcattttgttttgttttgttttagagatagggtctccctttgttgtccaggctggagtacagtgggacaatcatagctcagtgtggcttccaattcctggcctcaatctatcctcctacctcaccctcctgagccactgggataacaggcatgagccactgtacctggcctcttgccaatttttataatattccagctatttttttaggttgtctggaaatatcctcacttaagggattagttttaccccttatcatatgtttgctgtctcaaaggaacacccgatgatcctgaccatgcctgctattctttccctttgccccttgtttttctgctacttaatacttgagtttatgyccccatcctcaattatcattgcatagaatttatttatacaggttaataagaaagaactgagaaaagaaagtttagcaaagtaatagaaataaaaactcagcggccaggcgcggtggctcacacctgtaatcccagcactttgggaggccgaggtgggtggatcacgaggtcaggagatcgagaccatcctagctaacacggtgaaaccccgtctctactaaaaatacaaaaaattagcctggcgtggtgacaggtgcttgtagtcccagctactcgggaggctgaggcaggagaatagcatgaacctgggaggcagagcttgcagtgagcggagatcgcaccactgcactccagcctgggcaacagagcgagactccgtctcaaaaaaaaaaaaaaagaaagaaataaaaactcatcttaaaggtaggcttagcatatatagttatgtatttaacttatgctaatatgtaattcacacttattttcttatattttaatgcagcattcttctctttatagggaagaccaatcttaaggtttaaggatgaggagggtggtcattggtacaatcacttaccactttgctcacgtttttgaagggtcattgtaactatcttcatgggtgggctgtgggaacagcacatctgaagctctaacactcccacgtagccatatgcctttggcagctggagagtcatataaaatcagcactggcccatgttctcatacttataaacacctctctctggcttactactttagtatttatgaactattttctggcaagctacttaatcagaactttaaaaatggttcactttggccgggcacagttgctcacgcctgtaatctcagcactttgggaggctgaggcgagcagatcacgaggtcaagagatcgataccatcctaagcaacatagtgaaaccccttctctactaaaaatacaaaaattagatgggcgtggtgacacgcatctgtagttccagctactcaggaggctgaggcaggagaatcacttggacctgggagacagaggttgcagtgagctgagatcgcaccactgcactccagcctggtgacagagygagactccatctcaaaaaaaaaaggaaaaaggttcactctgataattaatttttttttttwwttttttccaggtgtatggtggctgatgaagtaagtgtttcaatggtttttatgtcttttataagattacacagcttgtttttagtgtctgctattttccatgtactctttctccatatgactatatgtctgtatatggggatggggagagagagaaagatgggagggtgaggagggagggggagagagaatgagaatgaatgaatgtgtgtgtgtgtgtgttttctagacatgcatctgatacatatgttaatattaacattagtgaccccaaattgttacctaggatgcatgaatgagttttgaaatgcagccccccaaaaagcttttctgttataatagtacttgcttaaaagctaaactttaaagattctgttctaaaggttattgtttattgtttcctatgagtttgaaacatagttctgaaatggtattttattatcactcaacaatytgatagatttaaatggcatgtgcttatatgtatccctattcgtgttttctctctgaaatggaggctcttgttacatgaactatgatattctttgtgtacattctcagactaatgtaagtcaataaagttctaatttttaacaaccgtttgagaaatgtgttgctgtttttcattatgtctttaagaataacagcaaaacggccaggcgcagtggctcacgcctgtaatcccaacactttgggaggccgaggcaggtggatcatgaggccaggagtttgagaccatcctggctaacacggtgaaaccccatctctattaaaatataaaaatttagccgggcgtggtggcaggcatctgtagtcccagctactcaggaggctgaggcaggagaatggcatgaacccaggaggcagagcttgcagtgagccgaaagcatgccactgcactccagcttgggcgacagagtgagactccgtctcaaaaaaaaaaaaaaaaaaaaaagaataacagcaaaacatacacttttcaaaatatattagaaatgaaggaaatggaaactgaattgttaaaaaataaaagtggaatcatcaaaaacttctcccaattaattatgatttagttttgcttgcatatagactcccaccaatggcttatctctgtagtctcttcttttgagacggaatctggctctgtcgcccaggctgcagtgcaatggcacgatctcggctcactgcaacctctgcctcccggattcaagcaattctcttgcctcagcctccccagtaggtgggactacaggcgcgcaccaccacgcccagctaatttttgtatttttagtagagaaggggtttcaccattttggccaaggtgttttccgtctcttgacctcgtgatccacccgcctcagcctcccaaagtcctgggattacaggcgtgagccacagtgcctggcctgtagtctgtttttaaggaaaacatgaatagagaatttaaggatttatttaaggaataacatgagtcctatacagaaatgttgatataggggttcatagttcatgctaatttataatgacctaattttttagtttgaactcttctttcattcaataggtgtttatttagactagatgttataattagaaaaagagtcattgccagtgaagaactttagcgatataattggagaaacaagacatagacatttgggaaacaataaacagaaatttttcttttgaaacaagatgagttcttttgttgttttttgtttgcttgttttggtttgtttttgtgttcttgttttgagaaggagtctcgctctgtcgcccagactggagtgcagtggcacgatctcgactcactgcaaggttcgcctcccaggttcacgccattctcctgcctcagcctcccgagtagctgggactacaggcacctgccaccacacccggctaattttttgtatttttagtaaagacagggtttcactgtgttagccagaatggtctcaatctcctgacctcaggtgatccgtccgcctctgcctcccaaagtgctgggattacaggtgtgaaccatcgtgccyggcctaaaacaggatgagctctaaatggctcttcataaattaattaatttgagagtccaaatgactgaaagaggcttacgtttttagtccttgaatatgttttcaacaaatagaaatatgaactcattctccaaaacctcaagactagccataactatttcctcttatatatatacatgtatagaacatatatgtcatatatgtatatgcatgtgtataaattcttttccaaacagaccagctgaggtccacagaaaatatattataaaaggtaacaaacagcatcctttatgatttccacaagtaagtcatggtgaaaaatcttagcagttatggtacaccattggtactttggtcctcattttgatgttgtagaaatctagatgcaccttaaatctatggaattcaccatggattcagataaacacttgatctgcaccataacccttctgatatggtttggctatgtccccacccaaatctcatmttgaatcgtagctaccataattcccacatgtgatgggaggggtgacccagtgggggatagttgaatcatgggggtgggtctctcccatgctgttctcatgatagccagtaagtctcacgagatctgatggttttataaatgggagttcccctgcacacgctctcttgcatgctgcagtgtaaaagatgtgaccttactcctctttygccttccaccatgattgtggagcctccctagccatgtggaactgtgaattaaacccctttcctttataaattacccagactcgggtatgtctttattggcagtgtgagaacagactaagacaccttcttaactcttatattctctaacacacccttatcctcagttaacgagtatgcagaggtcatgaacccttagccagcaagagtgttcccgttatacaaatcacttttccatttcttgtgatttacaattacatagcacttttcacatttggctgattcacatgttgtcatctttcaaaaccattcttactttttaattaaatacattgcaaaatccgtttaatatttcctcaatacttaaaaaaaacttccaccttcctgtccatcataattacttaattacttctctcttttcaccagcatttttgaagacccattattttacacctatttgacttgacagggtttatgatgttatatyctatttataatgttgattaagaaaaaatcttcaactttatacatgaatacaagaatcaggccatagaaataaacagaatgacatacaagacgtaagatcacagctcataaccactaataatctatttagtggtagagttggactgctatttttatggaatcttaccatgccagtgtggatgaaagttaataaattaaatgtgctgaagtaaaaagaacttctatatatgtaaattatatgaactctaccttcattctgttttctaatatggttttccttctcttgcttttattataaaacagtggtgaagccagagaaggaagtacaatttataatttaaaggtcaaccactttttgatttgtaaattaaaaatagattttcatgtgatgactgttgactcatcaaatagtgaaaagccttgggagagcaattttacatctgtgttattgaacctacttttttttttataaactcttgaatactcacttggagtattgtgtactttagctgtctgctgtgatcttttctccctagctttagaaacaaatgacgtccttcactagtattattcccccttctttcggtatcttttcactgttatctttttctttttcttttccttttttttttttaattctttaakatctagggtacctgcgcaaaacgtgcaggtttgttacataggtatacatgtgccatgttggtttgctgcacccatcaactcatcatttacattaggtatttctcctaatgctatccctcccccagggccccacccccgaaaggcccccgtgtgtgatgttccctgccctgtggccaattgttgtcattgttcagttcccacctaagagtgagaacatgcggtgtttagttttctgtctttgtgatagtttgctgagaattatggtttccagcttcatccatgtctctgcaaaggacacgaacttatccttttttatggctgcatagcattccatggtgtatatgtgccacatttgcttaatccagtctgtcattgatggacatttgggttggttccaagtctttgctattgtgaatagtgccccagtaaacatatgtgtgcatgtgtctttatagtagcatgatttataatcctttgggtatatacccagtaatgggatcactgggtcaaatggtatttctggttctggatccctgaggaatcaccacactgtcttccacaatggttgaactagtttacactcccaccaacagtgttaaagcattcctatttctccacattttctccagcatgtgttgtttcctgactttttaatgatctccattctaactggcgtgagatggtatctcattatggttttgatttgcatatctctgatgagcagtgatgatgagcattttttcatgtgtcttttggctgcataaatgtcttcttttgagaagtgtctgttcatatcctttgcccactttttgatggagttgtttgtttttttcttgtaatttgtttgagttctctgtagattctggatattagccctttctcagatgggtagattgcaagaattttctcccattctgtatgttgcctgttcactctgatggtagtttcttttgccttgcagaggatctttactttaattagaccccatttgtctcttttggcttttgttgccattgcttttggtgttttagtcatgaagtccttgcccatgcctctgtcctgaatggtattgcctaggttttcttctagggtttttatggttttaggtctaaaaccattcaagtctttaatccatcttgagttaatttttgtataaggtgtaaagcagggatccagtttcggctttctacacatggctagccagttttctgatcaccatttattaaacaggtaatcctttccccattttttgtttttgtcaggtttgtcaaagaccagatggttgcagatgtgtggtgttatttctgagacctctgttcccgatctattgctcaatatatctgttttggtaccactaccatgctgttttggttactgtagccttatagtatagtttgaagccaggtagcatgatgcttccaactttgtttttctttgtgtaggattgtcttggcaatacaggctcttttttggttccatatgaactttagttttttccaattctgtgaagaaagtcattggtagcttgatgggggtggcattgaatctataaattaccttgggcagtatgggcattttcacaatattgattcttcctacccatgagcatggaatgttcttcgatttgtttgtatcctcttttatttcattgagcagtggtttgtagttctccttgaagaggtccttcacatcccttgtaagttggattcctaggtattttattctcattgaagcaattgtgagtgggagttcactcaccatttggctctctgtttgtctgttattggtgtataagaatgcttgtgatttttgcacattgattttgtattctgagactttgctgaagttgcttatcagcttgagattttgggctgagacgatggggttttctagatatacaatcatgtcatctgcaaacagggacaatttgacttcctcttttcctatttcaataccctttatttctttctcctgccttattgccctggccagaacttccaacactatgttgaataggagtggtgagaaagtgcatccgtgtcttgtgccagctttcawagggaatgcttccagtttttgcccattcagtatgatattggctgtgagtttgtcataaatagctcttattattttgagatacatcccatcaatacccaatttattgagagtttttagcatgaagggctgttgaattttgtcaaaggccttttctgcatctattgagataatcatgtggtttttgtcattggttctgtttatatgctggattacatttattgatttgcatatgttgaaccagccttgcatcccagggatgaagccgacttgatcatggtggataagctttttgatgtgctgctggattcggtttgccagtattttattgaggatttttgcatcaatgttcatcagggatattggtctagaattctcttttcttgttgtgtctctgccacgctttggtatcaggatgatgctgcctcataaaatgagttagggaggattctctctttttctattgattggaatagtttcagaaggaatggtaccagctcctcattgtacctctggtagaattcggctgtgaatccatgtggtcctgggctttttttggttgttaatctattaattattgcctcaatttcagagcctgttattggtctattcagagattcaacttcttcctggtttagtcttgggagagtgtatgtgtcaaggaatttatccatttcttctagatttcctagtttatttgcgtagaggtgtttatagtattctctgttggtaatttgcatttctgtggaattggtggtgatatcccctttatcattttttattgcatctatttgattcttctctcttttcttctttattagtcttgccagtggtctatcaattttgttgatcttttcaaaaaaccagctcctggattcgttgattttttgaagggttttttgtgtctctacctccttcagttctgctctgatcttagttatttcttgccttctgctagcttttgaatgtgttcgcttttgcttctctagttcttttaattgtgttgtcagggtgtcaattttagatctttcctgctgtcccttgtgggcatttagtggtataaatttccctctacacactgctttaaatgtgtcccaaagattctggtatgttgtgtctttgttctcrttggtttcaaagaacatctttatttctgccttcatttcattatgtacccagtaattcaggagcaggttgttcagtttccacgtagtcgtgtggttttgagtgagtttcttaatcctgagttctagtttgattgcactgtggtctgagagagagtttgttataatttctgttcctttacatttgctgaggagtactttacttccaactatgtggtcaattttggagtaagtgaggtgtggtgctgagaagaatgtatattctgttgatttggggtggagagttctgtagatgtctattaggtccgcttggtgcagagctgagttcaattcctggatatccttgttaactttctgtctcgttgatctgtctaatgttgacagtggggtgttaaagtctctcattattattgtataggagtctaagtctcattttacrtctctaaggtcttgttttatgaatctgtgtgctcctgtatttggtgcatgtatatttgggatagttagctcttcttgttgaatttgtccctttaccattatgtaatgaccttctttgtctcttttgatctttgttggtttaaagtctgttttatcagagactaggattgcaactgctgcctttttttttgttttccatttgcttggtagatcttcctccatccctttattttgagcctatgtgagtctctgcactgagatgggcttcctgaatacagcacactgatgggtcttgtctctttatccaatttgccagtttgtctgtgtcttttaattggagcatttagcccatttacatttaargttaatattgttatgtgtgaatttgatcctgtaattatgatgttagctgattattttgctcgttagttgatgcactttcttcctagcctcgatggtctttagaatttggcatgtttttgcagtggcttgtagtggtttttcctttccatgtttagtgcttccttcaggagctcttttagggcagacctggtggtgacaaaatctctcagcatttgcttgtctgtaaaggattttatttctccttcacttatgaagcttagtttsgctgcatatgaaattctgggttgaaaattcttttctttaggaatgttgaatattggcccccagtctcttctggcttgtagagtttctgccgagagatccgccgttagtctgatgggcttccctttgtgggtaaccccacctttctctctggctgcccttaacatttccttcatttcaactttggtgaatctgacaattatgtgtcttggagttgctcttctcgaggagtatctttgtggcattctctgtatttcctgaatttgaatgttggcctgccttgctagatgggggaagttctcctggataatatcctgcagagtgttttccaacttggttccattcgccccgtcactttcaggtacaccaatcagacatagatttggtcttttcacatagtcccatatttcttggaggcgttgttcgtttctttttattcttttttctctaaacttctcttctcgcttcatttcattcatttgatcttccatcactgataccctttcttccagttgatcgaatcggctaatgaagcttgtgcattcgtcacgtagttctcgtgccatggttttcagctccatcaggtcctttaaggacttctctgcattggttattctagttagcccttcgtctaatcttttttcaaggtttttaagttctttgcattgggttcgtacttcctcctttagctcgaagaagtttgatcgtctgaagccttcttctctcaactcgtcaaagtcattctccgtccagctttgttctgttgctggtgaggggctgcgttcctctggaggaggagaggcgctctgatttttagaattttcagtttttctgctctgttttttccccatctttgtggttttatctacctttggtatttgatgatggtgccatgtagatggggttttggtgtggatgtcctttctgtttgttagttttccttctaacagtcaggaccctcagctgcaggtctgttggaagttgctggaggtccactccagactggtttcctgggtatcaccagcggagtctgcagaacagtggatattggtgaacagcaaatgttgctgcctgatcgttcctctggaagtttcatctctgagggatacccggccatgtgtggtgtcagtctgcccctacttaggggtgcctcccagttaggctactcaggggtcagggacccacgtgagaggcagtctatccgttctcagatctccagctgtgtgctgggagaaccactactctcttccaagctgtcagggacatttaagtctccagaggtttctgctgccttttgttcggctatgcagtgcccacagaggtggagtctacagaggcaggcagacctcattgaactgccgtgggctccgccctgttcgagcttccaggccgctttgtttacctactcaagcctcagcaatggcggacgctcctcccccagccttgctgctgtgttacagttcgatctcagactgctgtgctagcaatcagctaggctccgtgggcgtaggaccctgcgagccaggcatgggatataatctcctggtgtgccgtttgctatgacggtcagaaaagcacagtattagggtgggagtgacccaattttccaggtgccatttgtacccccttcccttggctaggaaagggaattccctgatcccttacgcttccaggtgaggygatgccttaccctgcttaggctcacgctcaatgcactgcatcctctgtcctgcacccactgtcccacaatccccagtgagatgaacccagtacctcagttggaaatgcagaaatcacccctcttctgcgtcgctcatgctaggggctgtagactggagctgttcctatttggccatcttggaaccgcccttaactgattttttgaagggtgttttgtgtttctgtctccttcagtgctgctctgatcttagttatttcttgccttctgctagcttttgaatttgtttgctcttgcttctctggttcttttgcttgtgatgttagcgtgtcaattttagatctttcctgctttctcttaagggcatttagtactataaatttccctctacacactgctttaaatgtgtcccagagattctggtacgttgtgtcttttttctcattggtttcaaataacatctttatttctgcctttatttcaytatttaaccagtagtcattcaggagcaggttgttcagtttccatgtagttgtgaagttttgagtgagtgtcttaatcctgaattctaatttgattgcactgtggtctgagagacagtttattgtgatttctgttcttttacatttgctgaggagtgctttacttccaattatgtrgtcaattttagaataartgygatgtgrtgctgagaagaatgtatrttctgttsatttggggtggagagttctgtagatgtctattaggtcygcttggtgcagagctgtcttcaagtcctggatatccttgttaaccttctgtcttgctgatctgtctaatattgtgagtggggttttaaaagtctcccattattattktgtgggagtctaagtctctttgtaggtctctgagaacttgctttgtgaatctgggtgctcctatattgggtgcatgtatatttaggatagttaagtcttcttgttgaattgatccctttaccattatgtaatggccttctttgactcttttgatctttgttggcttaaagtctgttttatcagagactatgattgcaacccctgctttttttttgctttccatttgcttggtagatcttcctccatccctttatttggagcttatgtgtgtctttgcacatcagatgggtctcttgaatacagcacactgatgggtcttgactctttatccaatttgccagtttctgtcttttaatgggtacatttcgcccatttacatttaaggttaatattgttatgtgtgcatttgatcctgtcattatgatgttagctggttgttttgcctgttaattgatgtagtttcttcatagcattgatggtctttacamtttggtgtgtttttgcagtgactggtaccggttgattctttccatgtttagtgcttccttcagtaggtgttgtaaggcaggcctggtggtgacaaaatctctcagcatttgcttgtctgtaaaggattttatttctccttcacttgtgaagcttagtttggccggatatgaaattctgggttaattaaattgcccaaggacatataactagaagatgccgggacctgatatttgacctcaagtgaaataattggagtgattcagctccaactctcactgtcaattacattacagtccccaggtaccagactttctatttttgagacagtattcttgaggacagaagaatttggaagacatagggctcaaaggaataagacagtgaagttagaatgaaggtgatagcattaaaagtgtgtgttggtgagactacacggtagtcctttaaatcagtgtcacctgcctgcttacttccttgtttctaagtccaactttattatttttgaatgtgctcttttaaaaaaatttttaatttaatacaattttagatttatagaattattacaaagatattacagagttcctgtataccccacacccagtttcccctattattgatatcttagattagtatggtacatttgtctcaattaatgagccaatattcatatattattattaactgaagaccatactttatgcaggttttctcagtttttctctcatgtccttttaaaaaatatataaataaaaataaaactaggattccatccaggaaacacattactctgcatattagcaatgtctctttaggcttctctgggttgtaacaatttctcacacactgtttgtttttgaagacctttacagttctgaaaattagtggttaggtagtttgtagcatgtcccttaattggaattcaactggtactttccttgtggttatacttggggaatatgttttttgggggaagaccatagaggtgaagtgctattgtcatcacatcatacaaagtatgcatactatcaatatgatttatcactgttaatgttaatcccaatcacctggcttaaggtagtgtttgccaggttttgttactgtatagttactcatttccccccctttttttatactgaatttttgggaagaaagtaactattcacagcccatactttaggaatggagagttgtgttttacgtttttgttttgtttttttttttgagatggagtctcactctgtcacccaggatggaatgcaatggcgtgatctcggccactgcaacctctktctcccgggttcaagcaattctcctgcctcagcctcctgagtagttgggattacaggcacccaccactacacctggctaatctttgtatttttagtagagaccggctttcgccatgttggtcagtctggtcttgaactcctgacctcaagtgatccgcctgcttcagcctcccraagtgctgggattacaggtgtcagccactgtgcctggatgtattttactttcttaaacttgagttagtcagggktctctagagggacagaactaataggatagatacatatataaaggggagtttattaagtattaactcacatgatcacaaggtcccacaatgggccatcagcaggctgaggaacaaggaagccagttctagttccacaactgaagaacttgggagtccaatgttccagggcaggaagcatctagcacagcagaaagatacaggctgggaggctaggccagtctctcttctcacatttttctgcctgcttatattctagccaccatggcagctgattatattgtgcccaaccagattaagggtaggtctgcctttgtcagcctgctaactcaaatgttaatatcctttggcaacaccttcacagagacacccaggatcaatactttgtatccttcagtccaatgaagttgacactgagtattaaccatcacaaagctggagtaaatacataaattatttggaattcattcattcatttatttacttaatcatgtatttgtatcagtgtggactcatggatattaattgtatactttgagttaaaattcattactactttctttatcttgttgctcaaattgtttcagctttggcaattgggaacccactcctgtgtccctttgacataaccccttcattttagaagttttttgttttggtttgggtttttgagcattttcttactttctggtactacaggatgcttcaggctcatctatgcatttcttgtcccagtctagaatcagtcatttttcaaaaaaaaactaatttcattttactgaagatcgatactagaatgaggacctgggtgctccatttctccaggggtgtccttctaggttctatcagcttatagagcaaggagattatatatactaacttgtgtgtgtatttatacatagatatacatatatatgtacatgtatagcagggtgtgaaggccaggaatccttgacattccttggtttgcagatgctgtacacacacattgctatgcacacacattaagtatctgtaatctttaaccctaacagtgggtcccaccatctgccatctgtttacttaattgctgatttccagtatacatgaatagcagtttcacagttgttaacctgtacctccatgggaaagaactttattggctagagcatggtgtaatgtacagttccttttgactttattcttatagactccattcatttccaatgttactcaggtcagcaccttattcccccacatcctccagtgaggatatttcagacatttgtaatacatatacattcttttatcacattttgttttccatcctggtatctttgccctcctcggttatttttaaaatatttgcgtacattcaggtttactctttatgcgataaagttcaatggattttcacaaatgcttaatgtcttgtattcatcattatagtatcatacaggacagtttcactaccctacacaatcccttgtgcctcatttattcaatttcccccagggctgaacccctggtaaccactgatatttttaacaatttcatagttttgccttttccagaatatcatataattagaatcctatatgtatgatatttacagaccagctttattaacttagcaatatgcatttaaaattcatccgtgtctttttgtagcttgatagccttttctttttatcactgatttatattgcattgtatggatgtaccacagttcgttttttcgttcacaaagatgaagagacatcttgattgcttccagtttttgacaataaagctgctgtacatattcacatgtaggtttttgtgtcaacataggttttcaaatctaggagtgtgaaactgctagatcatatagtgtgctagtttcctagggctgccataagatagtaccacaaactggggggcttaaaataattgaaatttttactctcatagctcgaggctagaagtctgaaataggtgtcaacagggtaggtttcttctgatgtttccgagggataatctgttccatgcctttgtcctacttgccagtgaaggccagcaatccttgatttgtagatgcatcactgtattgtctgcctctgtcttcacacgccattctcccagagtgtctatgcctcttcccttatagggacactggtcagattgaattaaggttactctaatatgacctyattttagctatttatgtctgcagcaaacctatttttaaataaataatttcatatcctgaaatactagaggttagaacttcaatatatcttttgggagagagttacccaattcaacccataacatatggtaagacaatatttttttttttttgagatggagtttcgctcttgttgcccaggctggcgtgcagtggcataatcttggctgaccacaacctccgtctcccgggkttcaagcgattctcctgcctcagactcccaagtagctgggattacaggcatgctccaccaccccggccaactttgtgggtttttttttttttgagatggagtctcgctctgtcgcccaggctggagtgcagtggcacaatctcggctcactgcaagctccgcctcccaggttcacgccattttcctgcctcagcctcccaagtagctgggactactggtgcccgccaccatgcccggstagttttttgtatttttagtagagacggggtttcaccatgttagccaggatggtcttaatctcctgagctcgtgatctgcccgcyttggcctcccaaagtggtgggattacaggagtgagccaccgtgcccggccactttgtgtttttagtagagatggggtttccccatgttggtcaggctggtctcgaactcccgacctcaggtgatccacctgccttggcctcccaaagtgctgggactgcaagcgttctttctctgattaattcctttccttctgtgtctcatatttttctcaagtctacctaaaaagtaatccttcaatacattcttcagttttgaagaatgtggcaagcgtgagccactgcacccggccaagaccatatttttttaacagaaactgtcgaagtgtcttttgtattagctataccattttccatttccattagcagtgaaagagagttccgcttgctctgcatcctcactagccgttggtattatcatttttcttttagctattctaatgtatgtgtagtagtatctcattttcatttgtaattctctattcacctatgttgttgaggatcttttcatatgcttatctgccatctgcatatcttcttaggtgaggtctctgttcagatcttatacccatgtttaaatcgtttctttttttgttgttgagttttaagagttatttgtatattttaagtacaagtctttattagatatgttttaggtcgggcacggtggctcactcctataatctcagcactttgggaggccaaggcggccagatcacctgaggtcaagagtttgagaccagcctggccaacatggtgaaaccccatctctaccaaaaatacaaaaattaggcaggtgtggtgggaggtgcctctaatcccagttactcaggaggctgaggcaggagaattgcttgaacctgggaagcagagattgctgtgagctatgattacgccattgcactccagcctggacaacaagagcgaaactccatctcaaaaaaaaaaaaaaaaagatatgttttaatattttcttccagtctgtggcttgtcttttcattctcttaacattgtctttcacagagcagaagtttagtttagtttagtttgtttagtgtagtcttgctctgtcgcccaggctggagtgtagtggcgtgatctcagctcactgcagcctcccaatcctgggttcaagcagttctcctgcctcagtctcctgagtagctgggattacaggaactggccaccacacccagctaatttttgtatttttagtaaagacgggatttcgcatgttcgctagtgtggtctcaaaatcctgacctcaggtgatccgcccaccttggcctttcaaagtgctgagattacaggccgatagagtaaagcacttcacaagctagccactacctgtttcttccattttcttctgctattctctggcagaaattctagagacagttccatctatttgttgtaatctttaccaattactgtttacatcacactggaccagttaattgatctctcagcttcaattatctcttgtttaaagtaggcaataataatacttttgccattggattgcttatgtaaagcataggaagaatatgtctcatatacccaacaaatgttagttttcttgctctttttcttttgttttcaaacaccatgaccttctttctttctctttcccctcccgtcccctcccctcccctctttcttttcttttcttttttttgacaagagtcttacccaggctggattgcagtggggcagtctcggttcactgcaacctccgtctcctgtgttcaagcgattcttatgcctcagcctcccgagtagctgggattacaggcatgcaccattacacccagctaatttttgtatttttagttgagacggggttttgccatgttggccaggcttgtctcgaactcctggcctcaagtggtccgcctgcctcggcctcccaaagtactacagttacaggtgtgagccactgcacccagcccatcatgactttttatgctttactatttctgtgtagttctttctctgattaattcctttccttcttctgtgtctcatatttttctcaagtctatctaaaaagtaatccttcaaaacattcttcagatatcactacctctatattgccatctctggttgccttttggttcctgtctgctctcacttctgctgtagtttgaatcatatcctaccgtacttgtctggttttctccacagattggaactcctaggagccatatgtacttaccacagtgcctgagaatgtatttctagttaatgtctcctgaacaaatgaatgaatttttattaatttattctttatgttgacttaagatcacttgaactagtcagaaaaaagaaaagatctcatcacctagacaaatggaggtcttgtctatcagtaaccagtgctttttttttttttttcgagatggagtctcgcttttgtcgcctaggctggaatacagccttgaactcctgggctcaagcaatcctcctgccttagcctcccaagtagctaggactacaggtgtatgtcaccacatcaggctaattttttaatttttttttagagacagggtccactgtgttgcccaggctggtctcaaactcctagcctaagcaatcctgccttggcctcccaaagtgctaggattatccgtgtgatccactgcacctggcttttttttttttttttttgaratggagtctcgctctgtcgcccaggctggagtgcagtggcgcaatcttggcttactgcaagctccgcctcccgggttcacaccattctcctgcctcagcctcctgagtagctgggactacaggcacccaccaccacgcccaacaaatttttttgtatttttagtagagacgggtttcaccatgttagccaggatggtctcgatctcctgatctcatgatccgcctcccaaagtgctgggattacaggcatgagccaccgcgcctggccagcacctggccttttaaccagtgctttaaattagatccatgccttctaccacccacctccagttatcctaagcatggagataaagtagcagatattcctttaagtgggtttggggattgtcttgatcccatctgactcctataacaaaaatacaatagacaggtggcttaaaaaacaaatatgtatttctcacagttctgggggctgggaagtctaagatcaaggcgccaacggattcagtatctgatggtttatagacatccatcttcttgatgtgtcacatggcagaaggggygagattgctttctgaagtcttaagtttctctgtgtctctttttttttttttttttgagacagagtcttgctctgtcacccaggctggcacagtggcaccatcttggctcactgcagtctctgcttcccaggttcaggtgattctcgtgcctcagcctcccgagtagttgggattacaggcacctgccaccacacctggctaatttttgtagttttagtagacatggggtttcaccatggttggtcttgaactcctggccttaagtgttctgcctgccttggcctcccaaagtgttagaattacaggtgtgagccaccgtgcgtgggctgaagtctcttttaaaaggacactgatctggttcatgagggccccacccttatgacttccctccaaaagcctccacctccacctcctgatacattcagggttagagattttaacatgaattttttggagaaaaaacattcagcccttgacaggaatcttttcaaaaactttattaaaatgtctagcatagagtattcttggttttctaaataagtttaagtcatttctcagcctaaaaatttatcttgaccactagcagagtacaaatgcaattgattgcatcttcaattttaaagaagtctgtcctgatttctttggaagctgatgtaattttgttgagagctcctgctgttttgcacaactgggttattgtggtattctctcaatagtcttagacaaaattcgaaatgaaaagcagaggtggcagtgatggtgagttaaaccatacccagatagatacagacacaaagcatcctcctggaatttaatgtttaagttcacatcagcatttgaaaagcacaaagcactaatagcatcatctcaccctaagtattgttattatattaatacattaacacctccaagtgcatcgtaaagaaaatgttgcaaacattcctaccataccagtttttattaagtgaaatgttctttatgactagcagttgtttaaaaatgggaagaatggttaaaattaaatcccaccctgtaacctccttttcctttttgagtaatgagcttaaattttgacagaacttaaaaatccaaagaggccacaactttattggtgtgttagttcattctcatgctgctgtaaagaaatacctgagactgggyaatgtataaaagaggtttaattgactcacagttccacatggctggagaggcctcaagaagcttaaggttatggcagaaggcacctcttcacagggtggcaggagagagagaatgagtgcaagcaggggaaatgccagatgcttataaaaccatcagatctcatgagattcactcattatcatgcgaacagcatgagggaaacccccaccatgagccagttacctccacctggtcccacccttggcacatgcagattattacaattcaaggtgagatttgggtggggacacagagccaaatcacatcaatgggcctcttcccacatctgtattgggaattggacaactgagaatatacataaaggctcccaactttycatgtagagtagctagggatggttatcaatacaagtcttaactctttgtactgaaacattttaaagccatttttttcctgtatccattgattaatctaacttttactcctgtatgcaacaaataaatattattgagtcttctgtttggtaagttcttagaactatggattaagaaacatgccttcattcgcagcaacctggatgatattggagactattaattctgagtgaagtaactcaagaatggaaaaccaaacatcatatgttctcactcataactgagagctaagctatgaggatgcartggcataagaatgacacaatggactttggggactcggggaaagggtgggaagcgggtgaaggataaaagactaaaactgggtgcagagtatactgcttgggtgatgggtgcaccaaaatctcacaaatcaccactaaagaacttactcatataaccaaacactacctgttctccagtaacctatggaaataaaaaagttaaaaaaaaaaagattatagaacaataggtaaaaaatgagcttgtttttgtttaagccacgtccctcaaaacacacaaaattatagctatttatctgtatgtgtatagataaagatcttcgaggatattaaaaaaaaaaaaaaaaaaagaaacatgccctccctctaatcaagtaaggatgagtgggggtgtatagctctgtgtggtatctgtaaaatgtagggtactggaaatattggaagtgaagtttacaatataaagtctatgatactattgtggaaggaaccattaatttcatattgattaagttggaagggtttgtggaggaggtagattggaagtgggtcttgtaaaagaaataagtagaaaaccagcattgaaaaaacgaaaattgaggagtttattgactgagcaaccctcaatgatttgcaagccctgtttcacagaactgtctttcacagaactgaggttgagactgagggtatgggactatgaggtccccaccttacttcggctatagtggtctcactttttcggctttacaaatgttgagtttctgtataatattttatttgtaaaaaacttgcattgctttaaaaaaacaagtgtaagattgacttttcttgattcttagcttcgtgtcctcttcttrtatattatagtgaggcaaagtgtgtctctttctcttaacctttatctaattttactcatcagtggttcagaagttttcagtagaatgatttaatctttgacattttctgcaggttctaatcttctcatactgctttcaattttttaaacattaatttagaaacaaactattaataaaatatatttgtaatgatggcaatgttttactgttttgaaattttatatatttaagcccataggaaatgagatatttctagagagtcagagtttttaggatagccaggcattccatttttttttttaccgtaacagttttgaaagaaacatttttttcaaatactttctatgtatttctgtttttttaaacattgtactctgaacataatttaaccttttttgttactcaaagttatcaactactgagacaagttaggccctttacttaatctaatagagtgttttaagttatgtgtctgcatcttattttttattttcacccctccaaagcctttttcttctctgtcctaagtgagtttacaggcaaaatgaaatgactctttatctatttttgttaatgttggtattgaggctattattgataaataatattagaaaagacgagtaaatgctgtctgctgaaattttctgctatttttcagtacatttttatttgaaatttacgttttaggttattttataatagatcattaattcatggattgagttagctgtctttttttaatttttaatttttgtgggtacatagtagatgtatatatttatggggtatataagatattttgatacaggcatacaatgtgtaataatcacattaaggtaaatggggtatccatctcctcaagcatttatcctttgtgttgcaacaatccaattatactcgtagttattttcaaatgtacaattaaattattattaactacagtcacccagctatcttacttttttatttcaatattgattcctaccatttactactttatttcaacattttcataatattttgttattttattttaacttattagtttatgacatgatgttaaccatgaatttaatgaactattttcactgcttttaatgccactaatatttcagtaaaataaaatcaagcccagatttggtcttaacatattcattttctcctaaaaactaactttcattatttattgtttattgttgtagttattagtacatagcaaataacatttattttgactcttaacccaatttgaaatttttttcttaggaagatatttttagataaccttctcattaacttttctgaagttcattatgtattgcattttctcttatcaactgattctacaaaattaaagtcattttaaaattttgacatgaataatatttaataaattaggaatgtgactagcatgtgatgacattatcagttttgacatctcatttctttttatagattaaaagtgaattccttaagtaataattgacagactgtgctcttttgagtatattctatgtatagattcatttaagaaatttggagctattactaattctactagaagacaaaagaacagagaagttattcaataataacctgttattattggttattataactaataaacattattgaataacttctcagttaattcatgctattgagtaaaagagaagttattcaataatatatttagttatattgggaaaacaagggacatctctatccaataaaaatgtcagaaactgaatatttttcaccttgtcatagtactaccctggagatcatggtgacattgcattatagggaaaagttatctatcactatgtttaatgcagaaacaatttatgtagatgctaccgtagagaagaaaaccatatggtttagacccaggaaactctaccttgacaatggggtggtttatttatttatttattttttttaggttctagatctttattaacttttccagatttgtgatttttggttttctctctcttgttcatgtacgcactctcaaacacaaacacacacacagtgattgtttataaagacttgacatcaatccttaaggcaggcatcccaaaagcagatacagacagggcctccagggagtgaagtcctcgcagggacatgggcacactgggatgagaggaccccagctaaggagcagtccccgcctccagtccactgtctacacggggacgtggctgccaccagtcctgagttgttgagagaagccaggagtcacatttttacacagatctgagttttaaacactataaactgaggttcttaccatacaggtccaagagatcacactatgggccaccactccagagcctcctgtcctaaagtatgaattctgagcaccaacttgcaaatatcaaggtaattagcacatatttgcacggccatttttacaaagcagagttggagtggtttttagagtaaaaatcattggtgccaacgttctttaaatatataaaaattattattattattttttgagatggagtctcgctctgtcgcccaggctggagtgcaatggcatgatctctgctcactgcaagctctgcctcccgggttgacgccattctcctgcctcagcctcctgaatagctgggactacaggcgcctgccaccttgcccagctaatttttttttttatttttagtagagacgaggtttcactgtgttagacaggatggtctcgatctcctgacctcgtgatccacccacctcggtctcccaaagtgctgggattacaggcgtgagccaccacgcccggcctaaaaattaatttttaaataataaatacttacaagaattgatagttttctctttctttttcttagtagtcctttttttttcttttattgcctaactcaatttaaacagcaaattttacttgtaacattccatgtctttcttagaataacaaattgattttgctgtctcatttgattcatattcttgttttcatttctgcacataatacccagcctaatctcagtattcagtggccttcctttatgttttaacttttgaaactactcaactcattagggctcaatttttagtcaattgttgtattttggcaactggcagaggatgtgattaaccagcattttgttttcctcttgcttatttcctttttcattttatgtaacgatttagtaaccattaggtaagttaatttgtacttttcttaaaaaaaaaactttcacaaaggcgtcctttctttctccytctttttaatatatacgagacccatcttaaaagggtgtacgttctgaatctgagtagggaatctccatcattgtttaattaacatttccaaaaattacctagttgagatttggaattctttctaatggtttattctgaagtgattgctatgtgtcaacacatgaattgacagattaatccaagtacttgttcaaccgaaagcatcctaataacctgcaaaaattttgtctcaagctgttgatggatgtgcttttgattccttattttaaaagcagaaataattttccctttgttacaaataagtggtgtctttatttatttattttacttccaccataattttatgtgtcattatgtaactgcagaacatagtattttaatatactagtctgaatttcaatacagggttctttattttctaattatgatgtcttcaaattaattatagtgttgccacattaaaaaggatataaagcatcacgctgtaattatttatgatactaagcaagggatttattcatcttccttttataaaatctccaactgaacttatctatggtccttaatggcagtaatcaagtttgccaagtgcaaatgcttcttatctgctctttgtttcctaatccttatcttcatgtgttttgaaacacccttttgtttacatttgtgatcaacaaattcagtgttagtaaacaacatagaaaatttagtatttttcatacactttttttaagaatatgttatattttcactgtgttcattacgtatagaaattttagtgatgcaagttattgttcttccaatttgttaaacagttaaggttgatcattgagscttatatatagcactttaattgattacctgagatatataatcaaagcaaggtgcaaattagataccctttcagtgcctttattaaacttctgaaattagtctttttctataaaattgctagctaattcaagtagattgtgaagtgaaaagccaaatttcgtttttgttttgttttttgagacagaatcttggtctgtcacccaggctggagtgcagtggtgcaatcctgacttactgcaaccactgcctcctgggttaaagcaattcccctgcctcagcctcccaagtagctggaattatagttgcccgccaccacacctggctaacttttatatttgtatttttatttttcatttatttattatttatttttatttcattttatttatttwtttttttgagacagagtctctgttgcccaggctggagtgcagtggcaccatctctgttcactgcaacctctgccttccaggttcaagcgattcttctgcctcagcctcccgagtagctggggctacaggtgtgtgccaccacgcccggctaatttttgtatttttagtagagacggggtttcaccatattggccaggctggtctcgaactcctgacctcgtgatctgcccgcctcggcctcccaaagtgatgggattacaggcgttagccaccgtgcctggccttatttatttttttgtgacagggtctctctctgtcatagcctaggctggagagcagtggtgcaatctcagctcactgcaaccttcgcctcccagggctcaagcgatttctcctgcctcaacccccctgagtagctaggattacaggcatgagccaccacacctggcctaatttttgtatttttagtaaaggtggggtttcaccatgttggccaggctggtcttaaactcttgacctcaagttatccgcccacctcagcctcccaaagtgctaggattacaggtgtgagccactgtgctcagccccaaattctgttttagataaatttattctacatactatatagcagggtagaaagcactatgtttatactgccttggaattgtaattaaaggtcagtcaagaaaccagataccccagaaatgatttaaaagttcaagaatcaaatcatggaagtgtttttcgtgtttttatctgtttgtttctcctgatgaggaaatggccaaaaattaggcaaagctaagatttttttcccaaagtttaatcattatagtagttattctcaaaatgcaacctgagagtcatccacataagaatcatttttgcttgccccttccttccttccttccctccctccttccttcccttcttccttccctccttccctcctgccctccttccttcctgccctccttccctccttccttcatttcttttatttttagagacgagttcttgctgtttcactcaggctgaagtgcagtgtcctggcctcaaacaatcctcctagctcagcctccccagtagttatgactacaggcacatgccagcacatcagcaaatttttgtattttttgtagagatgtggtctctctatattgcccaggctgatctcaaaaatcctggcatcagacaatcctcacatatcagcctcccaaagggatttttattttaaaagtccatttctattgaatcagaatttgaggtgttgtcctgaagtctgaatttttaacatgtatctaaatgatgcctaggtataatagattgtaagaacttagagcataactgggagattggactttttccccccatttctttttgtcctttccttttctttctccctaccctacccaagcacttgtagttattttctttgtgctgtgttgggctctcaattttaagaaattgctgaggctcctatactacaatgcaagtggaaaaaaatgactagaatcttaattaagtttgttaacttggttttaattttacaaaacagatttaaaacgtacaaaaattatggaaaatttatttctgaacttcaaattttatctgaggaatggtactgttgaatgaataatacatatgcatgtgagcagttcccattatagttaagtatctcattttttactgtcttgtgactctttaagattaaatatgagctgggtgaggtgatgcttgcctgtagtcccagctacttgggaggctgaggcaggaagatcacttgagccaggagtttgaggttacaatgaactatgatcatgccactgcactccagcctgggcaacagtgcgagatcctgtctcaaataaatgaataagaatttagaaattttgcttcttttggcactgtgtgatatagattatcacttctttttgtctactacttttgaagtgtagaacagccctcttttccttccaccaagcacgactgctactacgttgtagagctgtaactttttttttaatctttttacttgaaagtcatttcatacttacagaagggtttcaggaacataaataatacaaagatcatccatataccctttactcagatttatcagttgatgacattttattccatttgtaaagctgtgactttgaataaaactttactagagactggaggaggataaaaataccacattaaaagcataacatctaactgccactagaaatgtctattcttaaaacacgtttgctcaagtggggcacagtggtgtgcacctgtaatcctaggtactctggaggctgaggccagaggattgcttgagcctaggaatttgaggccagcctgagtaacatagagagacccatgtctaggaaaaaaaataaaaaggggcatatatttgcttatatccagcctctcagaccattccagagccttctccctgattttctttttctagtcccaatatgggcatctctaagccatgctttggactacaactctacttaagttctgccaccatccccgactcagtgccctccctttagataaataagtttttttcctctcatcctgctgctctctaaggcccatctcctttctgccttcctctgttcccagtgcattcccttcaagagaaagcctgctcctgcacacaagtaccaaccaaccatcaggaaagtgatagcacagttcccaaagcatagactcttctgtcttgagtaagaagaagatcagggctatgtgcatacccatatggtctgttctcttttcctagtcccttatgagaaaagaagacagaattgaaatgtacacacactattctattctttttttttttttttttgagacggagtcttgctctgctgcccaggctggagtgcagtggcgcgatctcagctcactgcaagctccgcctcccaggttcatgccattctcctgcctcagcctcccgagtagctgggactacaggtgtccgccaccatgcccggctaattgtttgtattttaagtagagataaggtttcactgtgttagtcaagatggtctccatcttctgacctcatgatccacctgccttggcctcccaaagtgctgggattacagacgtgagccactgtgcccggccgtacacacacaattctaagaacaaataatcacgtgtaccatctaaaattctctattggaaatagcactaacaatgtacaagaacaagaaagtggttctgctaaaatatatacccccttaataataagtaacagaacatagtatttcagtctgctatttctttatgcgggttttctttcttaattgaaatcctcactaagattttaaaagcatacctaaaagggtcctccaaagcaatctcttttataacaaacaggccacctattttaaagacaaacctacctatctgccttcaaaggaacaagctgcttataacattaaaaccggaaaagtttttagtttcgaaaaatgtcaatgagcatttttaatgcatagaaataaaaattgctttataaaagtaatcacagtataaaaaagtgaaactgaaattttatgtatcaggataattgttatttaattgctcttaataatttcatagaataaaacatttaggaaacctaaaattattctcctaagtaaaatggtgatttacaattttgaaaacattgatgaaatgtgttcttgaggttaatgtattctatttaattcttatgtagctacctggacatttgtactattgtttattcaagactttgattcttaatcattgatttagccttaatggtgatgaaacactgaagagttccacattaacaaattctattgttgttagagcccagggctttgaaccacatgttgagtgtagttattcctgtatgcctaaattacttgaagtgtgttgttgcttttataattgaatgctatgctgttttcaattcttttcaaaatactgaaatctggccaagtgcggtggctcacgcctgtaatctcagcactttgggaggccaaggcaggaggattggttgagccaggagttcaagacaagcctggacaacaaagtgagacccccccatctctacaaacaaacaaacaaacaaacaaaccaaaaacaggcatggtggtgtgcacctgtagtctcagctactcaggaggctgaggtgggagaaccgcttgagcccaggagtttgaggttgcagtgagctgtgatcaggccaggccacagcactccaacctgggtgacagtgagagcctgtctcaaaataaaaacaaaaactgaaaatctaagtacatgttttaaaagtttattttttattttattttattttatttttttgagacggagtctcactgtgtcacccaggcaggagtgcagtggcacaatctccgctcactgcaagctccgcttcccgggttcacgccattctcctgcctcagcctcccaagtagctgggactacaggtgctcaccaccacgcttggctaattttttgtatttttagtggagatggggtttcaccgtgttagccaggatggtctcgatctcctgaccttgtgatccgcccaccttggcctcccaaagtgctgggatacaggcatgagccaccgtgcccagccaaagtttattttgttttatctatttattcatttctttatttttgaggtggagtttcactcttgtcgcccaggctggagtacaaacgcatgatctcagctcactgcaacctccgcctcccctgttcaagcaattctcctgcctcagcctcccgagtagctgggactacaggtgtgygccactatgccgggctaatttttttgtatttttcatagagacggggtttcatcattttggccaggctagtctcgaactcctgacctcaggtgacccacccgcctcagcctcccaaagtgctgggattacaggtgtgagccactgttcctggccttaaaagtttattttaaaaggtagtccttttcaaattttatttagaactgagtcattctatgtattattcctttctttaatgggaatatgagattatgccaatatacttttattttctaatttagaactatgtatttttctagtttgtttcatcaaactttatttcctacctcaccatgtcccaaaaatgaacaaccaaaaacaaatacctaagaaaaatagtacccaaatgtttcactttgtattgataaatatctttctaatttctgagaatcacttttagtcatttcactacataatctttaaactaaagagatgctgaataagaagttgggggttcttaccaggaaagatagctggacaaaaactgagtgtcagtgtcagtcctaataccatagggtatgatcttcaagtagattaggaaatgggtagattaagaaattttcttttcttcttttcttctcctttcttttcttttcttttcttttttcttttctttgtttcctttttttttttttcagggtctcattctgtcacccaggctggagtgcagtgacgtggtaatggcacactacagcttcaaccttctggactcaagcagtcctcccacctcagcttccccattagttggactgtaggcacatgccaccacacctggggattactaaatttttctatagagacagagtctctctctgttgyccaaactggtcttgaactcctggcctcaagcagtcctgctgcctcggcctcccaaaatgttgggattacagatgtgatctactgtacccaaccaagaaatttattattttcagtgacagcaagttgatcaaatcctgagatgttttactctagctaataaagctcaaggaaactcttttataaaaatcacaatgccagtttattaacgtatattgaaagatggctttccctttatcatggtcaccctgaagagatgcaatggacctttccactcaaaatttcatttggatgtcgaggctgatgatgctacccagacatgaagagggtatgaaagggtttattactgacataacaagtctttctgggatgaggagggcaggctcccaagtagatataaaaatgacttgaaaaaaaaacaaggagaagagacaggcatagtctcttattgggcttatggggtggggttaaggtgagggttcttaccatgtgggccggggcttgcatagcttgtatttcccaccagtgccaaaggaaatagcacccacactttcgtatctgcttgtacacaattggggcagaagggtaagagggcttgcatgtaaacatcaaaaaatggagtgagactctttattttatccttctgtttgcttccattgcttattcttatattcagcacatcagctttgcaagaccaatccttgcatgagttatactgaagactgtttgacttgagaaacttttttttctttttaaaatgacttcatatttcttaattggtacttaatgttttacatttcatacttcttaaatggcagtcgtatttttttaggttattaggaaagtatgatatgatagctgggaacaggaagaaaatgttcagaattttgaaaacctaacaaaaataatacattattagctcccataatttgttttttccttttcagctgcctaaattcatcaccgaatattcaatttatcttccttaagccttaagcaacataagtcaaacaggctgcttctacttgtttctctcagagactattctgtctacttcccaaactatgcactgtgcatgtagatacgaagataaaaatctcagagaggaggaaacttgagagaattataaagaaaatctgcatacacgttagccttaagtctttggctatttcctaaactatacatgcacagaatgagatcccaagaaacctagaagaaatatagagttgggaaggataaaaactaagccaagattttagcagtattgtggtactaagtagacagagatggggttgagccttgttgaggtaagaaattgtttacagatatcttgcgttggcttctgttgacccccagaagggccatcttctataataaatagcaggcgctgggaataagggcaacaatgagtaaacttgccctttaaaagcgtaaaaccaagtcttaaaaggaatgaggtatttgccrttactcaatttgccttccctaagaaaacttaacctaacccctcttgggagaagatactactacccaaagcttctgtgaattttttactcaagatatctggtgttaaattagaaaatatgagggatcctgaaaaactggtaccaaaaggaaaaggaaatagagcccacatgagatcagatgttgttatcagagagagactttaaaataacttatttttttggctgggcatggtggcacacacctgcaatcccagcactttgggaggctgaggaaggcagatcacttgaggtcaagagtttgagaacaacctggtcaacatggcaaaaccgtgtcttggcaaggcgcagtggcttacgcctgtaatccaagcactttgggaggccgaggcgggtggatcacctgaggtcaggagtttgagaccagcctggccaacatggcgaaaccccgtctctactaaaaatacaaaagttagccgggagtggtggcatgcgcctgtaatcccagctactcgggaggctgaggcaggagaatcgcttgaacccaggaggcagacattgcaatgagccgagatcatgccactgcactccagcctgggtgacagaacaagactccgtttcaagaaaaagaaaacaaaaaccctgtctctactaaaaataacaaaaattagccaggcgtggtggcactcgcctgtagtccccaggtactcaggaggctaaggcacgagaatcacttgaacccaggaggtagaggtggttgcagtgagccaagatcatgccactacatttcacccttggtgacagagtgacactgtctcaaatataaaacaacaacatcatcaagaaaatcagcaaaaaggtggacaaaaagacgttwcaaaggagaatgtaatctattaaaaagaatgtaatagattgtaaaaaatgtaattaatagaatgtaatctattaggccgggcatggtggccctcacctataatcccagcactttggaaggctaaggtaggtggatcgcttgagctcaggagttcgagaccagcctgcccaaaaagtaccaaaaaaaatagctgggcatggtggcacatgcctggagtcctggctacccagggggctgagctaggaggattgcttgagcccagatcgaggctgcagtgagccacgattacgccactgccctccagccacagcaagaccctatctaaaaaacaaacacacaaaaaaaccccaagaatttttaacatgttagaacaaaaacaacaacaaaaacagattctaawggacattttagaactgaaaaataacatctggagttaattctagtagatttaatagattagatacaagaatacagaattagagaactagaagacaaaaatattcaaacttctaatcaaataaacttcccagcatatcaggattcttcttattcttacccatacttatgctagtttcccttttcttcgcctgtcgtcaacctaaaacttctttttcttattttttctttaaaaatatttatttgacaaataaaaattatatatatttatggtgtacattatgttgttttgaaatatgtatacattgtagaatggctacattgaggtaattaacatatgcgttacttcacatgcttttttgtgatgggaacacttaaaatctactctctttgcaatttttaagaatgtagtatgttgttattaactatagttaccctgttggacaatatatctcttcaccttattccttctatctaactgaaatttttttttttttaattctacctattgtttcaagtcccaattctacgtatcctattgaaggcttacatacctgatctcagtagacaagatgaggaaattttgaggagtggcggtctttgggagagagttgtctggcaagccaacacagaacattgttagtcatacatgaagtgcaaaatgtatagatagacaggtgactggcaccaagtaaatttagcagcaagaagctgaggttctagtgatagaatctgggttgcagagagagaattctgctttccagaaaaccagggaagcaaaacagatcctatttccagataaattgaaattaagaaaatgtgttatgaaaccatggcaggaaacaaaaccaaagacccctaaccatagcacaaagttagtggtattgtccacacacaaaaaatagggccaagcctcagttcctggaagtctgtttttggcagagttgttgaggcggggaagtggcacactgaataactctagccaggtaaagatctgtaattgttggccgggcgcggtggctcatgcctgcaatcccagcactttgggaggccgaggtgggtggatcacctgaggtcgggagtttgagaccagcctgaccaacatggagaaaccccgtctctgctaaaaatataaaattagccaggcgtggtggggcatgccacctcagctactccagaggctgaggcaggataatggcttgaacctgggaggtggaggttgctgtgagccgagatcgtgctattgcactccagcctgggcaacaagagtgaaactccgtcttaaaaaaaaaaaaaaaaaagatctgtgattgttaaagttctgctgtattggaaccaagttgttcccagaatccagtgatgtttgagtggcttcgggtgtgaaaattggrgggctttgaagacacggaaacatactaattattatccaacgaatgtgtaaatataactttgcatgaattctaagattgcttttttgttgttaacaggagcagttaaaagaaaaatacataaacaaaataataaagttttctcawtggaaacttgcttaaagtccaaaatctgctcttttctcatttctttagttttgctcagcatttaaaattcatttttaaactctttgttttcagtttctgcatttttcttttttctctttgtatagtctggtaaacagggcctgtcttttagtctctctttcccattgtttgccatagtaactactaaaaaagtaaggattattgaggtataattcacacttttatgtaaattcacccatttttagtgtacaattctgagttctaaaaaatgcataggttatgttaacagccactaacatcaaggtatagaccgactccattcctaaaagttccctcatgctattcccctcccccacctccagcccctggcaaccacggatctgctgtggctcccttttgttttactttccagaatgagacatataaatagaatcatagagtatgtagattttgaatctggcttctttcacttaccgaaatgcgttttagatgtattcatgttgtgtagagcatgagttcattctttttttattaccgaatagtactccattgtatgaatatgacatcatttgattattcatgcacaggtgaagtacatttgagttatatccagtttctggctattttgaacaaaaacactataaatattcactaagtgactactttttaaattggaacagcttagaagtcaggcattgtgacagtgtggatacaaatcaagtgggaagacacctgagacctgggatctcatacgagttttgcatcagccagctgtgatttaaataatttaacttctctatgtctgcttgttttgtaaaatgtgcatcattcaggacttactctagttttgaaataacatggttttgtgctgttaagacatttactatagtctaagaggagagactataaatggttacatacattttataaaactaattatataaaatcaacataatatttaaccttaggagtaattttgtctctttaagttcaatcatgaatagtttgaacataatatgatttgcttaatgaattttacaggtccttattatctcaaactttttattaactgtataatccaactaattttacattggaaaattattttgataatacatttttttttagacagccttactctgtcacccaggctggagtgtagtggttcagtctaggctcactgtagcgtcaacttcctgggtccaagcaatcctcccacttcagcctccaagtagctggaactacaggtgtgtcctaccacgcccagctaattttttgtacgtttttttatagagacagggtttcaccatgttggccaggctggtctcgaactcctgggctcaagcgatccacctgcatcagcctcccaaagtgctgggattacagtcatgagccatcacacccagstaataatactcttaaataaaatgtttgataaatattttcttttaaaatattttaggctctattattaacatttatttattttttaatttagatgggtctaggaaagacaatccaggcaattggaattacttacttctataaagaggaatggcctctgttaatagtggtcccttcgtctctgaggtacccttggacagaagaaattgaaaaatggatcccagagctaagtccagaagaaatcaatgttattcagaataaaactgatgttaggtaagaacaactgtttaatatttaaggagaaaagtcttccttgtgtgtacctggtatatattcatgttttagaatgcaatatcaccaatagataataatttagaagtggagtaagtagtatggagaattttattttacattttaaaatatgaattatttatctaaaacccaatagtatattttakttctaagttcctttatggtatatttttaaagtaaatgtaaaatacgtatacttttaaagatatatgtagtatatctactttatatataccttaaacatatttgaaaccatcttaaggttcagaaataaatctcacaacttttcattgattgacttgaagctttgtgatcgtttattatcagcaacttcagtggattttgctttccaatttgttaattaatatgcaagttttgtgtgtgactcattagtaagtttgattttccttatttataattttaatattttatatcttgaaaatatttgctttgtgtttatttgaagctctcactctaaaatctgttatagtgttagtatttttttcctcattttgctttctagcaattagaataagacaatcagtttgagtattgatgagttattacatggaatgtgtaggtgattcatacaaattatgtctctggaggttcaaagttatctatttctgaaccttaaataaaaagcagtacagtacatctactgaaataaatatctgttaatacttagatttttaaattttggtattattgtactgtattgtattctctaagactgttaacataaaaggtatatttaaaaataaagttgtcttacgaatgtggaaggaggaaacacaaaatgtatggagggccttttcactttcaaccttgaaatgctaattcagtagcatrtatctttatgrgcccaagaaaatctggactctatttacatggttaaaatggaaaaactgctatcttatcctaattattataaataaatctcctctccaataaaactgaatgaaattgaaaagacttacaaatttagagaatgtagaattttttaaggcctccataaccatcatctgtttggtataccttatttatttaatttaattaattaattttttttttttttggagacggagtgtcactctatcgcccaggctggaatgcagtggcaccatgtyggctcactgcaacctctgcatcctgggttcaagggattctcctacctcagcctcccgagtagctgggattacaggcaccaccaccacacctggctgactttttttatttttagcagagatggggtttcaccatgttggtcagtctggtctcaaactcctgatctcaggtgatccacccacctcagcctcccaaagtgctgggattacaggcgtgagccactgcacctggctgataaaccttatttaaatgttcacatttaaattttcttaaaatgactcttctatcatcttttatagccactagggcatctagtttttatattattttgaaaatacactcttgcagttaaatggtggataatatttttatttgaatagtatttgggatatgttagataggagtacaactccagagtataagtttcctggaggatgttagttaaggacagaaaaactacccaatgtcttccaggtacttaaagaaacaggtttaggtgtataccaatatgtccaccacaaatacatatactttccttctggcttatatcagttatgcctggactgtttacaagtcaagacatggtaggatagaagctacagattgctgcagtggcctttgaagccagtctcctatatgttgctctcagtatacctaagttagttagtaatattaaataacctattactttcttcttcaggctcttctggtgtttgaatacagtgagaaaattataggtctcggccaggcacggtggctcacgcctgtaatcccagcactttgggaggccagggcgggcggatcacaaggtcagaagatcgagaccatcctggctaaaatacaaataattagccaggtgtggtgatgggcacctgtagtcccagctactcgggaggctgagacaggagaatggcattaacctgggaggcagagcttgcagtgagccaagatcatgccactgcactccagcctgggcaacagagcgagactctgtctcaaaaaaaaaaaaaaaaaaaagaaaattataggtctctgtattaagtagattaatccagggcttaaaatgcagtagccatagtggttctggctgcttaggagctctaccttttctgttagaggatagagaattgaagaagactggctctgtcctgtatttttttctggtgatatagaaaatgcaaaagtgatatgtcttagtattattgaatttatttgtctaattatttcattctacaaactttatttgggatcatagcactgtgtatgaatactactaaaagatgaataagacacattccctgcccttaccaatctcatgatatggtaagagacataaatatgtaaatgaataatttattgacagcaagatacagaatattacagatgtatgaattatagaaatctaaagatcagggatcattttagcttaatggttcttgatgtgaggtggtacccrcttcttctaacyacacttcacattttatcatctcaggtccaggaagctttttgttgtcacaaaagcttcggactccactgtcctttaataggtaggaccaggaaatgaagctctgcggtgcactgaacagccctgttaagtctgttctgctactggtattttgagcaggagggcctgttcagtgcactgcagagcttcacttagtcctgctcaaaataccagtagcatctggattgaaaaactgctatcctatttgtgtgaaagtttcattgaagagtcaactaatatttaagtatccattttatgcatgatcctaggtgcatagaagcaaatattgtcagaaactaatgtggcttgctggatgtcaaaatctttcaaagatcatttaactaaaattttggttttggttaaccaaaactgtaaattttggatcctggtttattatatttgaggattgtgaaatcttcagagtttcagtagtagtaccatctccttttatttttcctctattcttctttcttctcctctgtattttttcccaagagagttgtattgttyatgataacgtcattactgagatattttttaagtacatggattttcttttctaggagaatgtygaccagtaaagtgacagttstgggttatggtctcttaaccgcagatgcaaagactttgatagatgcmctgaataatcagaacttcaaagtagttatagtggatgaatcacactacatgaaatccagaaatgcaactcgcagcaggattttattgccaatagtacagaaagccagacgagccattcttcttacaggaacaccagctttaggaaggcctgaagaggtattacaatccttatacttcgaacttaaaagaagagaaggggggtgggaggcgtattgaatcaaccacctgttttgcaatttttaatttcaaattagatgccttaaatgctagaggagtacattgggaatttctagatagtacgtatgttttatcatggctattttaatatatttacatttaagccttagccaagcttgtaggtatgtataaaacatagcttttacctttattataaggctgccatatttagtacaactttataatattcttcataatgtgttcctgaggttcttctatggtcttaatcttcatttatcctattttacattataagcttcttagggttgggattgaatctaccttatttcttttacactgcatttcagagcttctgtctgttcttctttcactttaagagtcacatttggaaaagtaaagagaaactaaaacttacgtgcagaccagataaggtatctgcttagaatgaaagaataaggcatgtgtttgataccccatttagcttttgctactctaagagatgggtagtacgtggaatggttaaagggttaggaagaagacatgatggaagaaatgtctgtaaggtttagtgttgtttaaggaggctctgtttactaatgaacactgaatcttagaaaaacatgggctgtcatgtagggttgctgggagaattaaaggtaatactgctttgaaagttcctcaccctatgccttgtcacatagtaagcactcaacatatggtagccaatgttatattaatttttgagccaagcctgggtgacagctattgtcattgccctgtctaacagtattacctaagctctgcttttcaattctatcctggaaatcttgtgagatacatataaaagtacatagatagtgatgataaaatgcttaattttaccttttatagtttttactcttggatgcccactgacagtgctgtagctccacgtaattgacattatgtccrcaaattatgtcaatgaataataggggtgatgatatacttaaaaaaaatcatgaaacgtatccttcaagatactcagtcctactgagtccagagagtcggctggactcagtagctcatacctgtaatcccagcactttgggaagccgaggcgagtggatcacttgaggccaggagttcaagaccagcctggccaacatggtgaaaccccatctttactaaaaacacaaaaattagctgggcatggtggcctgtgcctgtagtttagctacccgggaggctgaggcaggaaaatcacttgaacccaggaggcagaggttgcagtgagctgagatctcaccattgcactccagtctgggtgacagagtgagactctgtctcaaaaataaaagagagtatacaaaagatacatacatttcaaatgacaataataaaatgaatactcatctacttataatcgagcataagaaatagaacattaacagtacaacagtggctcttacatcctactctgatgacatgtcagtacttttcactcttcacctgtggtagccactattcaaagcaagggtaaataccaattttgtgggtcctgatgattgtataatttgtgtttgggatttttttctaagaaaaagaatataaaattagaaattctaagtttggagttttgaaattaggaagtgtgagttctctaattttttctttctttcttttcttttcttttttttttttgagacagagtctcactctgttgcccaggctggagtgcagtggcatgatctcggctcacagcaacttctacctcccaggttcaagcaattcttctgcctcagcctcccgagtagctgggattgcaggcgcatgccaccacacccggcacatttttgtattttgagtagagacgggattttaccatgttggccaggctggtctcaaactcctggcctcaagtgatctgctcgtcttagcctcctaaagtgctgggattacagttttgagccaccacacccagtctatttccactcttatctttattgtgaccttccttctatttgctgtgggttgtttgctcttacttttccagtgtgttaaggtgaaaaattaggttattgatttgagttcttcttgtttaacatagtcatatgcaactattaattttcctctaagcactatttttgctgcaactcatgttttggtatgttgtgttctcaatttcctttatctcaaaatgttctctaatttcctttgtgatttcttctttggcccattggttatttctgaatatgttgtcatattaaatggatataaagcactgaagtcactttagaaaaatttaggagttacttaaaatgttactgtatgacccarcgattttattcttaggtatatacccaagagaactgaaaacaggccgggagcaatggctcacgcctgtgatcccagcactttgggaggctgaggcgggcagatcacgaggtcaggagatcaagaccaaggtgaaacccagtctctacgaaaaaatacaaaaaaattagccgggcgcggtggtgggcgcctgtagtcccagctgctcgggaggctgaggcaagagaatggtgtgaacccaggaggcggagcttgcagtgagccgagatcgcaccactgcactccagcctgggcgacagagcgagactccgtctcaaaaaaaaaaaaaaaagagaactgaaaacaaattctcaccaaaaattatatactcatgtgtatagttacatagtagcattattcatgatattcaaaaagtggaaacaagtaaaatgcccatcagttgacgaatgtataaacaaatgtgatatagccgtacaatggaattatttggacctaaagaggaatgaaaatactatatgtgttacaacatgaattaactttgaaagcactatgctgggtgaaataaaccagatacaaaaggctacatattgtataattctatttatatgaaatgcccagaataggcaaattcatagaaacagaaagtgggttagtagttggcaggattggaagagaggagaaataggcagtgactactaatgggtgtggaggttttttggggggtgataaaaatattatagaattagtcatgattgatgcacaactatgtgaatctattgaaagccactgaattatgttctttcaaagtttgaatagtatatgaattacatgtcacaataaagctgttggtttttaaaaatatattaaaataacagtgagacagtcctgtgtgtagcctatcagagctgtaaaaatgaaaagatttcatgatactattgatgggagtgtaaattgggataatcttcttactgggcaacatggtaacattatcaaactttaaaacagcatgtaccttagaatcagctattccatttctaaatataatcctacatcacctctaatagaaatgcaaatggatggatgaatgaatggatggatggatggatagatagatgattaatagatacagatataaatatatgtactatacctatatattcatatatatatacacacacagttatatgaagttgttaatattagtaacttcataaaagctagaaataggctgggcgtggtggctcatgcctgtaattccagcactttgggaggccaaggcgggtggatcatgaggtcagaagatcgagaccatcctggctaacaaggtgaaaccccgtctctactaaaaatacaaaaacaaaattagccgggcatggtggtgggcgtctgtactccaagctactcgggaggctgaggcgagagaatggcgtgaactctggaggcggagcttgcagtgagccaagatcacgccactgcactccagcctgggcgacagagcgagactccgtctcaaaaacaaaaaacaaaacaaaacaaaagctagaaatagcctatatgtccaatatcacgagtctgtttaaatcttttacagtacatctacatcataatgggttgctattcagtttttaagcagtgcattattattttattgtctatataaggttttaaaactaaaaatagacacgtgtaatttaagtgtctgagacatgttttatgggacaaaattctagtgtaacaatatatatgatatgatcctccttatgtgaataaaagcataaacatatgcttatatcaacatagaaagatgtataaatgtatatttatacaacagataacggttatccctgatgaatagtagtgaggggatttgaggaataaacagttggattttcttttatacttcctactattttgttaaatggttttatcattgtaataataatttacttgaaaatattacaacatactacaaacacttgtattattatagctttttatgcagattgaagctctctttccacaaaaatttggaagatggaccgactatgcaaaaagatactgtaatgcacacatcaggtaagttaaactattttccgtaaattttttcctcacatgtttactgtgaacattgctttattaatcattctttttttttttgagacagagtctcactcccatcgcccaggctggactgcagtggcaccatcatggctcactacaatctctgcctcctgggttcaatcgattcttctgccttagcctcctgagtagctgggattacaggcatgcgccaccatgcccggctaatttttttgtatttttaatagagatggggtttcaccatgttggtcaggctggtcttgaactcctgacctcaggttattaatcattctttattccagtgttttacaaatttgtggtagctatgaaataattggtggactattatacatataggtggatgacctatatgtaaaataaataaaagtaatagataatggcaaagttttcctttgtttttattttttactttctactttttatttttgaaattatttatttttattggctagatttacatgtaaattatacaaaagtaaaaactaagtgtttcttccactcttgtctctcagcaaaccatttcccttcccatgtaagcagtgttggcactttattgtgtatccttctgaagataccctttgggtgaacaagcatgtatgattacatgtgtataatattatttcattttatttcaacatatatagcacaatttgtgcattattctgcagtttgctttcttcgtctagtatgtattgtagatctttccatatcagttactcaaagagctttgatattcattttattttattttatcatatttttttcagacggagtctcgctccgttacccaggctggatggagtgcagtggtacaatctcggctcactgcaacctccgcttccgatgttcaagcaattctcctgcctcagcctcctgagtagctgagattacaggcatgcgcaaccatgcccggctaatttttgttatttttactagagatggggtttcaccatgttggccaggctggtctcaaactcctgacctcaggtgatttgcctgccttgacctccygaagtgctgggattacaggcttgagccaccacgcccagcctgttattcattttaaatgctgtatctattctactgtttagaatttatttatgcagtctactcttattggacgtttgtagtatatagctgtgcatacaatgcagcaatgaatatctttgcacatgttgagaggtagtattttatagttctgaagagcatggaaatttagagctagaccacctgtgttttattttcacgtctrctattgccgaacgcttcattttagaaaagtaactttatctcctcatacctcagtttcttcagctcaaaaaaaatggcaaattattatgcctgccttggagagttattataagacttatattaactaatatttctaaagtgcttgaacagtgaccatacatagggagtacttgataattgttagctattttagtatttcatgccatatgcataggggaaaaatctaagataaagttatagaagtgaaattgctagtttaaagggcatgtgcatttttatattattagatttttccaaatcatactccacggaaggtatagctttttatatttccaccagcttagtgtcagattgtttctttttccatacttttcaaacatagtgaaatgtgaattattttattcttgccaatgtgaactgatagtagcttgtgacatttgcccattatgtcattaaatgcatttgagcattattttttcacacatatgagtaatttgtactttttttctgtcagttgtctatgtgtgctgtttgcccttctgtctactaaatgtattggcttttttcttgatatgctgaaaatcttcatatattacaaaaataatctctttatatgtgatatgagtctctcatgttttgtttcccaatgcattttttttttataattcctttaaataacaccacatggtcatggttttctgatgctttttaaagggctccaaagtacaaagatagaattcttctaaattgtttctatgaagtcagtctaacacttaataccaaaatcagacaagatagcacaaaaaatgaaaacgagactacaaatgcagaaatcctcaatattaatagattaatgaaatccagaaactcattaaaaacctaatatattgattatatgcaaatggcattcacattaggaattcaaggaaagttgaatattaagaaagacataaatataattcaccatattaataatgacaaagagaaacctcatcatctctatatgtgctggaagtccttaggtaaaatatagcatttaccctccctgtttttttttttttttttttggagacagagtctcactctgttgcccagtctggagtgcagtggcacagtcayggctcaccgcaacctytgcctcccgggttcaagcagttctcctgcctcagcctccaagtagctgggactacagccgtgtgctgccatgccctgctaawgtttttttttttttttttttttttttggatttttagtagagacagggtttcgccatattggccaggctggtcttgaattcctgacctcaggtgatccacctgcctcagcctcccaaagtgctgggattacaggygtgagctaccatgcccagccaacatttacccttgattacagtttttaataaatttagggtatatatgtatatgtgtgtctttacatatatataagtgtatatatgtttatgggtgtctttcaatcccaaagcactaccacatgaaacactaaaatccagaaaaggatgttcactattaccacagcttacctgtactctggagaactgataattcaattactcaaaagaamaataagaggatatgaggctaattttgtcaggaaaaaatttttttacttaaaaaaaaagaaaaaagacgggcacagtgactcacacctgtaatcccagcactttggaaggccaaggtaggacagtcacttgagcccaggagtttgacactagcctaggcaacatagtaagaccccatctctattaaaagaggtaaacattttcaagaaagaaaaagttatcattatttacagctgatgttatttatttggaagactgagaatcagctgaaacatgttcaaaagaagaatagattaagatatcctagcacaaagttactattaaaaagtcagttgtcggccaggcgtggtggctcacgcctataatcccagcactttgggaggccgaggtgggcagatcactattgggggaaccggcccccaatatttcaatgtaggttcttttctattttccctaagtgttggctggtctgagaaataaagggaaagagtacaaaagagagaaattttaaagctgggtgtccgggggagacatcacatgttggcaggttctgtgatgccccctgagcygtaaaaccagcaagtttttattagcrattttcaaaaggtagggagtgtacgaataggctgtgggtcacagagatcacatgcttcaagggcaataaaatatcacaaggcaaatgggtagggcaaggtcataaggccagggtgaaactagaattgctgattaagttcatgtcccactgtgcacccattatctttgataaacatcttaacagggttcaagagcagagaaccagtctgactagaatttgccaggctggaatctcctaatcctagtaagcctgggggcgctgcaggagaccagggcgtgtttcatccctatctacaactgcataaggcagacactcccagagcggccattttagaggccccccgccctgccctgggaatgcattattttcccagggctgttaattattaatattccttactggggaaagaattcagcgatatttctcttacccgttttcagcaataagagaaatacagttctgtcctgcctggctcccaagcagtcagacctaatggttatctcccttgttccctgaacatcgstgttaccctgttcttttttcaaggtgcccagatttcatattgttcaaacacacatgctctacaaacaatttgtgcagataatgcaatcatcacaggatcctgacgtgacatgcatcctcagtttacaaagatgatgggattaagagattaaagtaaacacaaggataggaaattataagagtattgattggggaagtgatacatgtccatgaagtcttcacaatttatgttcttctgctgtggcttcagccagtccctctgtttggggtccctgacttcccgcaacagatcacgagatccagagatcgagaccatcctggctaacatgatgaaaccccgtctctactaaaagaaacaacaagaaaaaaaattagccaggtgtggtggcgggcacctgtagtcccagctactctgaggcaggagagtggcgtgaacccgggaggtggagctttcagtgagccgagatagcgccactgcactccagcctgggcagcagagcaagactccatctcaaaatcaatcaatcaatcaataaatagtcagttgtctttctctacacaaataatatttctaaaatacaatgaagataaaagatataagactcaagaatattactaaaggacatataaaaagataaataaaaagacatactcctgtttgatgaaaagacttggtattataaagattttactgktttttttgagacggaatctcactctgttgaccagcctggggtgcaatggtgcggtcttggctcattgcaacctccacctcctaggttcaagcaattctcctgcctcagcctcccgagtagctgagattacaggcgcgtgccgccaccacacccggctaatttttgtatttttacaaaatacaaaaaatacatggtttccccatgttggccaggctggtcttgaactcctgacctcatgatctgcctgccttagcctcccaagttgctgggattacaggtgtgagccacctcacccggccaagattttacttttttctgaacttaggtagatataatatattcaaataagaatatttttcttgtagatccagaaaattgattctaaatgttatttgaaaaaataaataagcaacaattgccaagaaagttatgaaaaactagagtattaaaaaaagggggttgggcgcagtagctaacgcctgtaatcctagcactttgagaggccaagccaggtagatcacctgaggtcaggagttcragaccagtttggccaacatggkgaaaccccatctctaataaaaatacaaaaattagctgggcgtggtggcgggcacctgtaatcccagctactcaggaggctgaggcaggagaatcactagaactgaggaggcggaggttgtagtgagccgagatcgcgccattgccctccagcctgggcgacaagagcaagactctgtcttaaaaaaaaaaaaaaaaaagaaaagggacagggattctttcccttcttcttacacaacaataaattccagatgaataaaatatttaaacattattaaataaaaccctaaataaaacatagaggaattcttttataactttgttttagggaagtcataaaaaggaatatatttgattgtgtaagaatttaaaaggtgtcacccttctagaaaatatctataaagtaaaaaatttctaattaaggaaaaattatttatgtgttgcgaattaaagagaaggctaatttcagcgactgagaaaratgtgcaaaaaatgtaaacaaataattgatagaaaaggaaatacaaataggttttaactgcataaatctaattgataagaggaatttaaattgaaactacagtaagacaaagttttacctattacagttataaaaattataacatttaacaaaacagtatatcatgagcatatgaagaaacaaactgtcttacattgttgaaaggaatgttatggctataccatctgttttgggttttttttgagacagggtcttgctttgtcacccaggttggagtgcagtggcacaatcatggctcagtgyagcctcaactgccttggctcaggtgatcctcccacctcagtctccctagtagctgggactacagggatgcactaccatgtctggctaattctttgttttttttgttgttttttttttcagatggagtcttgctgtgtcacccaggctggagtgcagtggcacgctcactgcaacctctgcctcccgggttcaagcgattmtcctgcctcagcctcccaagtagctgggattacaggcatgcaccaccacacccagctaatttttgtatttttagtagagacgggttttaccacattggtgaagctgttctcgaactcctgacctsaggtgttccgcccaccctggcctcccaaagtgctgggattacaggcatgagccaccacacctggcaattaaaaaatttttttttgtagatacggggtgtcagtatgttgcccagccttgtctggaactctgggcttcagcgatcctcccacttcagcatccttaagtgctggaattacagtcatgagccaccctgcctggcctataccatctattgatagaaatttcactatacctaccaaacattgaaaagcccatacatttattctagcaattaaaatataagtttatcttacacttgttcatatatactattgtatgtaattgttcatgtgtgttcttatacatgtgttattcacatatttattaaatacacaacatatagatatacacatacacacatatgcacatgtatgcaaaattgaaattgcgtgtttagtaaataatacatgattggataacaactagttgtagagaacttactgtaaattattgtacctccatacagtggaatactgtgtaatcttgatgcaactcatttccaagatacagtgttgaaagaaaaggaaattacagaaaattgtgttatcttttgtattttttaaaatgtatatgtgtaaaacacacgcactgattttccctggatgtcttgaaattgtcaacatggtagcctctgatgcccctgacccaactgacagtctctgagacttctctatagaagccacgcggcactgtggtgtccactttgcatgctgttagtttaactgttcagcatagtgtgattacccagctggctggagatttataagaagagaccagtttgcagtggcaagtgatcagattgatagggaacttgacctgcattgtattcctcattggagtgagttactagctagaagctctttgagggcagaacacttgttttttccagtattctattcccaatggctaacacggcacctggcacatgatatccaatgtttattgaattattgaatactggatctgggttttttttgtatgctagatccatgtaacttcttgacatgaataacatcattcatctgctaaattcacagatgttgtcaaactaatggggttactcagatataacttaaaattgctctgaaaattgacatagtattaaaaaatacgcagcacartcatcttggagaagcatttcttatactttagatttggagcttctggaataaaatggctgaactaagtgatttggataatctttcccagctcaaagtttkgtttcttcatattgactttaaaaatcatgagcaaaacagggattcttcttatattaagtgaaatactaagaggagtacttacgtaactgacactgttacatttattttactacttctgtataaaagaaaaaaatggaaaaactagtataatttggctactttctattaagaattttaatttaatatagttttgtgacttggactgagagagttctgtgacacagttcttagttgtttttctggtaactgggggcataattaatttgctaacatcagttttgattaaactataaatccatttagatgctagtttgaccaaagtaataactctttagtctttaccaagtgattttttttaacagtgcatggaaatgactataatgattttgctacagtgccacaaattaatatcccttccctccactaggaaatcaacagcagcaaatgtagttaacactgttagttgtctaccccgtcttccttccaagcaggtttctgatttacttcagttatatatacatatctatagcactctggggaagttgactttgtatcctttttccctgatggattctggtcattctaagccagttaacacatagtattcttcagacaactgttaacggtctagggttggtcttgtgccaagcatgctgaagaaaggctttatttccaggatggaggacaagataagcatcttaagctgaatatgaacaaagaagcatgttgtcctacctacttctggtagctgtcttctgaccatggtgggtatcgggtttagattaggcaagctttttaatggcacagtgacaaggtgcaaggaatacaagagttgaccaatccaggagccttcctggactctgaattccttttattcatgttgtaaaacrtttctttttttattaaacaatcttgattcagagtttcagttccttatagccaaaaaccatggttcctggcatgtcatttctaaatattcattttgttcctatcataggtctttttttttcatgatgctaggtattggtgggaagcccttaattgtaattgttgcagactgtaaatgcctaaaatttgcccacataaaacaaacatacttacctgcatttatcttttggagtctggaacaacccacgtggtcaataagcatttctttttttgtttcctgactagaacttgtcatatgacaacagaaagagagagtatacctgtctctttcttacttaatgcctaccctgtttcataaaaaaattcatctctgtgaaatgctttatgattgtggaggacatgttctgttttctggagaaagccatttcaagattaatatcatgcttctcaaaaggcattttctttcaggttccatttcagaagttttatgttattcctttacttctttaccttgaaagcactatggttccatagactctaactcagctcaagtcacttcctggcattttaagttagtctgtggagtgctatatatttttccataatgttttgattctgtgaaggtgtcattttcacactataattttgcagaatgcaaattttggttagttattcagttctagacccatattttatatttgaaatgtcatgactgtattcaaaataagttaagtgaagcttcagcaaaaatataattttgcttttataaagtgtattaaatacctaagtaatgacaaacagaaatgtactaatgcaaatgtagttcagggatgagaagttagggtataggtaaccagctacctggtttgacttgagacagacagcagaagtattactcaaccagaacatctcttatccaaaatgccttacatcattcacttcacagggttatatttagaagaaactataaatacaaatatgatttggagaaggcaacatactcagttgtcaaccattagcacattgaatgatcaattgttaaagctaaaagactttggagatcacccagttcccctctgtcattttataagcacttggtgagtttaaatggcttgctctatctcacttccttttatgttgtttttttttccccctggaagtaatgaaaacttagggaatggcaactttaataaatattcttttacatagaaaaagagaacacatagataacccagccaagcatcctgttaccagcagctgtcttcaaaaagtatgctgtgagaagacatattggtcgtccctaatattatgtttttgtttttgttgttttgttttgttttgttttgttttgtttgagacagagwcttgctcttttgcctgggttggagtgcagtggtgcaatctctgctcactgcaacctccgcttccctggttcaagagattgtcctgcctcagcctcgcaaataggtgggactgcaggcatgtgtcaccacaccaggcaaatttttgtatttttagtggaaacagggtttcaccatgttggccaagctgttgtcgaactccagacctcaagccatctgcccacctcagcttcccaaaatgctaggatttacaggcatgaggcacagcgcccagcctcttccaatggtgtgttaatgttatgtttgaattactgttgaattactatgttaatgtaatgttatgtttgaattactgttaagatattctagacactattctgtgtcacmcagaatagtgtctagaatatcttgacaataattcatcaatttttaaaatgttatttgtcattgatattttgtaccatttccacctctaaggagaattcgttgtctaaatttttatgagaggaaaaatgctgcatgataatacaaattaaaagtatttatagacatacctaaagattgttaattaatgggtcattgtcagcttcaagaaatgtctcaagggagagcatcaggataaatagctaatgcatacggggcttaatacctaggtgatgggttgataggtacagcaaaccacatggcactcatttacctgtgtaacaaactgcacatcctgcatatgtatcctggaacttaaaattaaattaaattatttttatttttatktttaaaatatatttatttttgagatggagtcttgctctgtcgcccaggctggagtgcagtggtgcgatstcagcacactgcaacctccgcctcccaggttcaaccgattctcttgcctcagcctcctaagtagctgggactacaggcgcgcgccaccatgcctggctaaatttttgtatttttagtagagacggggtttcaccatgttagccaggatggtctcgatctcctgacctcgtgatccacctgcctcggcctcccagagtgctgggattatagacgtgagctaccgcgactggcctaaattaaattaaattaaaaaaaaatgtctctcatggaattgcactgtccctcctttgtcctcagcattgttgcatttaatgttctcacccatggctgaatagaggttgtgtctattccattkgcaaatggttcgaatctgagagaaatagttaatatagtggatggcagagatatgtttgaaaaataattagataaatattaatagaatatgtattctgcattgagacttagaaagtcagctttgtgtggaagggatttgagaaaccctcacctatttatcaatagttcagttctaaaagatttgkggktttgaataaccttaggctaaattggagtaaggggkgcttctactccattcattgattaractgcatttagagtacagtttaattttgaatttatccattcattctgaaagtattttaggatgcytcttacatgytaagccatgtagtagccatcagatatgcattagagaacaagacccacatagtccagccttcactgagttttcaagtcaaatactaacctagttgaatattctagaactaaaagaagagagtttcaagatagtgacggagttaggtagggataatatacagagtcttgttcttcatcataatggcaataagaagacattgcagggtagtttggtttttagttatcagtattgtagttttttaattgcagtaaaatatgcataacaaaatttaccatttaagtatttttaaatgtacagttcagtagatacagttgcctktatatgttttaggtttttcaattgcagtaaaatatgtacaacaaaatttaccatttaaacatttttaaatgtgcaattcagtgactttcaatacattctaatgtgtttcagtacattctgttgttgtgcaaccattaccacttttcatcatcagaactttttcatcattacagattgaaactctgtacccattaaataattgaccccatttccgcctcccctagtccctataatgtaaaacttagagcatgaaacaaacatcattagatttatagatttgatttattatctaagatatttcacatggttcaaaattctaacctatggaagagtatacacattgaaaaatcccttttacctaagttctccctataggcgactgtatgtagtttttaatcttccctcagaaactgtgtgcatattcaggcaaattcattgttttaaaaagattgtaatataagcataaacattgttttgtactttccctttttgtctttttttcatatacataaatggtatacattatggttgcatgtcattgtatcattggaaatatactgtactttcggggatggcaggaagttgagagtttgccttgtacagtttatattttctctgtggaatgggaaggacaatcataggttcagagaaatggaaaaatagagggttaaaggtttcatgaaagttgatgtggtttgaaattttaccaaatgagaatgagattagtgtggtaggattgttaacagctctagtaatcatttgagatcagcaactgcagatttgtaatggaaccagttttctctaaggtacaatttctccagccacacccagcagcctggatacaggcatggaaaaggcttcaggcctttttgatcctgaggttggatccattcaagattggattttttcaacagcttatgatgcatggactgtgggacaagggaacttaaactatatttataagaacaaaggtaatgtatgaactcagaaatcaacagggctgaggaaagatgtgaagacagaaaaaatataatggatttggaaattagaggagtcagttgactgaaatgtattgatgcaatagtaaagacatagtgagtatgaatgaacaagcaccttcgaaggatggggtaagtagagagtagaatgtctcaatttaccaggtagaacggtttcttaggacctggttgtaaccatagggatagttggagtaggttttagagggtcattgaagacaatgagtgtgaggaactaagagggaactagaagccatgttttaagaagcattttaacaaatgaaaacatatctggaaaagggtgaccagaataatgagaggaatctcatattcagttcaaaaatgtctaatgttattgattgcctactatatttaagacattatttcagagctgccggcaatacaaagatgaataagacatagtacttgatcttatgaagcctacaggaatttgaaaacgagaagccctaaggggagcaggtttttaaatatttaaagatctgtcatgttctaaaagaattagacttctgtctttgtggcctcagagagcaaaactagtatcaagcagtggaacttaatagggaggtagattttggcttaatatgagtaagaagttttaaaatatatgtacttatgtattaagcactrtaacaataaaaatggaaaggaaaaataccataattctactatactaataagtaaactgttttcattttttatttctactcttgtctatagatctaattatttttacaaagttttatctatcttacatgtaatgaatgctatcatctgctaattttctcttaggaatgccttgtcccatgcattaacattgtctttataagttgtttcatttcctttacttttattgatttaaagatagtttatttcattttggaaagttattcatacttatttttaacaaaccacacatagaaaaaaacattttcttaaaaaagtaaaagtctcctagtgtctgataaaacagactttaaaccaacaaagatcaaaagagacaaagaagaccattactataatggtaaagggatccattcaacaagaagagctaactatcctaaatatatatgcacccaatacaggagcacccagattcataaagcaagtccttagagagctacaaagagacctagactcccaaacaataataatgggagactttttaacaccccactgtcaatattagacagatcagcgacacagaagattaacaaggatatccaggacttgaacacagtgcagacctaatagacatctacagaactctccaccccaaatcaacagaatatacattctttttagcaccacatcacacttactctaatattgaccacataattggaagtaaagcactcctcagcaaatgtaaaagaaatcacaacaaactgtctctcagaccacagtccaatcaaattagaactcaagattaagaaactcactcaaaactgcacaactacatggaaactgaacagtcttctcctgaatgactagtgggtaaataatgaaatgaaggcagaaataaaggtgttctttgaaaccaatgagaaaaaaggcacaacgtaccagaatctctgggacacatttaaagcagtgtgtagagggaaatttatagcactaaatgcccataagagaaagcaggaaagatctaaaatcgacaccctaatatcacagttaaaagaactagagaagcaagagcaaacacattcaaaagctagcagaaggcaggaaatagtttaactaakatcagagcagaactgaaggagatagagacacaaaaaaccaaaatcaatgattcaaaaaatcaatgaatccaggagctggttttttgaaaagatcaacaaaattgatagactactagcaagactaatgaagaaaagagagaagaatcaaatagacgcaataaaaaatgataaaagggatatcatcactcatcccacggaaatayaaactaccgtcagagaatactataaacacctctatacaaataaactagaaaatctagaagaaatggaaaaattcctggacacatacaccctcccaagactaaaccaggaagaagttgaatctctgaatagaccaataacaggctctgaaattgaggcaaaaatagcctgctaaccaaaaaaaagtccaggaccagacagattcacagggaattctaccagaattacaaagaggagctcgtgccattccttctgaaactattccaatcaatagaaaaagagggaatcctccctaactcattttatgaggccagcatcatcctgataccaatgcctagcagagacatgacaaaaaaacagaattttagatgaatatccctgatgaacatcgatgcgaaaatccttaataaaatactggcaaacaatccagcagcacatcaaagagcttatccaccacgatcaagtcagcttcatccctgggatgcaagcctggttcaacataacgcaaatcaataaatgtaatccatcacataaacggaaccaatgacaaaagccacatgattatctcaacagatgcaaaaaggccttctacaaaattcaacagcccttcatgccaaaaactgtaactaaactaggtattgatggaatgcatctcaaaataataagagctatttatgatcaatccacagccaatatcatactgaatgggtaaaaactggaagcattacctctgaaaactggcacaagacaaggatgcactctctcaccactcctattcaacatattgttggaagttctggccagggctatcaggcaagagaaagaaataaagggtattcagttaggaaaagaggaagtcaaattgtccctgtttgcagatgacatgattatatatttagaaaaccccactgtctcagcccaaaatctccttaagctgataagcaacttcagcaaagtctcacaatataaaatcaatgtgcaaaaatcacaagccttcctatacaccaaaaacagacaaacagagagccaaatcatgagtgaactcccattcacaattgttacaaagagaatacaaaggaatccaacttacaaaggatgtgaaggacctcttcaaagagagctacaaaccactgctcagtgaaataaaagaggacacaaacaaatggaagaacattccatgctcatggataggaagaatcaatatcatgaaaatggccatactgcccaaggtagtttatagattcaatgctatccccatcacgctaccaatgactttcttcacagaattggaaaaaactactttaaagttcatatggaaccaaaaaagagtctgcattgccaagacaatcctaagcaaaaagaacaaagctggaggcattatgccacctggcttcaaactatgctgtaaggctacagtaaccaaaacagcatggtactggtaccaaaacagatatattgagcaatagaacagaacagaggcctcagaaataacaccacacatctacaaccatctgatctttgacaaacccaacaaaaacaaatatggggaaaggattacctgtttaataaatgatgctcgaaaaactggctagccatgtgtagaaagctgaaactggaccccttctttacaccttatacaaaaattaattcaagatggattaaagacttacatgttagacctaaacccataaaaaccctagaagaaaacctaggcaatatcattcaggatataggcatgggcaagggcctcatgactaaaacaccaaaagcaatggcaacaaaagccaaaatagacaaatgggatctaattaaactaaagggcttctgcactgcaaaagaaactatcatcagagtgaacaggcaacctacaaaatgggagaaaatttttgcaatttacccatctgaaaaagggctaatatccagaatctgcaaagaacttaaacaaatttccaagaaaaaatcaaccccagccaaaagtgggcaaaggatatgaacagacacttctcaaaagaagacacttacgcagccaacagacacatgaaaaaatgctcatcatcactgctcatcagaggaatgcaaatcaaaaccacaatgagataccatctcacaccagttagaatggcaatcattaaaaagtcaggaaacaacacatgctggagaagacgtggagaaataggaatgtttttacagtgtttgtgggagtgtaaactagttcaaccattgtggaagacagtgtggcgattcctcaaggatctagaactagaaataccatttgacccagtgatcccatttctggatatatactctaaggattataagtcatgctgctataaagacacatgcacacgtatctttattgtggcactattcacaatagcaaagagttggaaccaaaccaaatgtccatcaatgatagactggattaagaaaatgtggtacatatacaccatggaatgctatgcagccataaaaaaggatgagttcatgtcctttgcagcgacgtggatgaaactggaaaccatcattctcaaactatcacaaggacagaaaaccaaacaccacatgttctcactcttatgtgggaattgaacagtgagaatgcttggacatagggcagggaacatcacacatgggggcctgttggggggtgggggcctgggggagggatagcattaggagaaatacctaatgtaaatgacgagttgatgggtgcagcaaaccaacgtggcacatgtaaacctatgtaacaaacctgcatgttgtgcacatgtaccctagaacttaaagtataataataataataaaaattggctttaactaaaaaaaaaaattaaaagtcaactgaagtgctttcgtaactttccctctagacagcttctctacttaagtacataaagaaggatgaattgataagcaattttatataaataagatcatattgtacacacttttctgtaatatgtctttatcacaatactatcttaggacattttttgatatcagtaactaaaatacataatttttattggctatatgattatattttatatatgatactatgccatgtgttttagwtgtattatctttaattcctttaacaatcctacaaggcagatgatagtatgtccattttayagatgaggaagctgtatttggaaaggttaagctgtatttggaacggttaagtaacttgtcaaatcacataactaaacagtgaaaaaacaagaatataaacaccctttgacacccgttttcttctgttctccttccagtatttgaattatttggtaattcagtgtccagttttatattattgactaagtatattaaattaatggactaaataaattaatattattctctactaaatcaagaagttgactgttcctttcttagtcaactttttgtttaccttataattcatttttttcccatctgtttggttttctatatagctattgctgctttttcactgaaagactccaaccaatctgtcaacttccaacatgtcttataagcacataaaataatcttttttcgttttcctggagattttcctcccacagccttctgttatgctccaatctaaaccaatttttctttaggcatggcagaaagctgtcaccctgaatttccttgggccattctgctctgttggatcctcacattcctggatttcatgacttttatttcttagtttattccctgatattttaaatattttattatggaaaaaattaacatatacaaaagtacatcctatagtataatgaaccccccatgtactcattacccagcttcaacaatgattatctcatgaccagttttatttttgctatgctcccatctacctcttctactccatattattttgaaggaaatcctagagattgtattttatctataaaatgtttcacatatgtctctaaagagtaaggaaggactgttcttttttttttttttttttttttttgagatggagtcttgttctgctgcaaggttggagtgcagtggcgtgatctctgctcactgcaccctctgcctcccaggttcaagcaattcccctgcctcagcctcctgagtagctgggactacaggtgtgcaccaccacgcctggctaattttttgtattttattagagatggggtttcaccgtgttggccaggatggtcccaatctcctgacctcatgatctgcccgcctcagcctcccaaagtgctgggattacaggcatgatccaccatgcctggccgggactgttcttaaaaataattatgcgggacttaatacctaagtcatgggttaataggtgcagcaaaccaccatggcacacgtttacctatgtaacaaacctgcacattctgcacatgtatcccggaactaaaagtaaaatttaaaaaaaactataaattttaatccccatttaaaaagtaattaattataataccattattataccttaaaaattaaaattaattgcattaaatcccttgattgcattaaaaatgcagtaaatggttgggtgatgggtgcgccaaaatttcacaaatcaccactaaagaacttattcatgtaaccagagaccacctgtaccccagtaacctatggaaaagcacaaacatgcacacacacataaaacatatttaattttacataattaaaatgcactttttatgttataaaaaatgaagtaaaggttgaaatttccagttgttttgtgaatacataattttactgttttttggggttctttttagttttttccctgtagtttgtatagatcagtacccaaataaggctcacatacagcaaatgatagatgtcactgaagtcttgggtttctcttttatttccttgttttatttatttatttttccattgtggaagaatctaaattgtttttgtaatctagattctgctgcctgcatcctcatggtgttgtttaacatgttcctttgtcctctgtatttccatgttcgtatttagatctagaaacttctaatatttggagacaattctcctttgtagtgatgttttcttctgttaggagatatctaaagcctctctttttatgatgttagcagctgtgaatgttcagtacattattaagcctttggacattgcagaatggtgatattctaacacactttcttcatttaatagttggcctgcctcatggccgggtgcggtggcttacacccataatcccagcacttttggaggctgaggtgggtgaatcatgaggtcaggagatcaagaccgtcctggctaacatggtgaaaccccatctctactaaaaatacaaaaacaaaattagccaggcatggtggcagccacctgtagtcgcagctacaggctgaggcaggagaatggcgtgaacctgggaggcggagcttgcagtgagccaagattacgccactgcactccagcctggagactccatctcaaaaaaaaaaatagttggcatgcctctttaaaataaaacctcatcataatttattatgtggacattcactggttcagtttgcttaagaaaggcaggataaattttttccttctcatttattaattttcaatgtaataagttgttttgttagcaacttacagtggtgtccagtgctttttattttcaaagttggcaagtttaagtccttcaactttgttctttttcaaggttgttttggctattctgtgtcacttgcatttttatgtaaatttctgtatcagcttgtcaacttcagcaaagaagtcagctggaattttgatacagattgcattgaatctgtagattaactttgggagtttagcatctttataatagtaagttttcaaattcatgaacagtaatgtctttccatttatttaattaaaaaagaaatcctacaatgttgtgtagctttcagggtataagtattacattttaaacaaatttacaagaaaaaaacaaccccatcaacaagtgggcaaaggatatgaaaagacacttctcaaaagaagacatttatgcagccaacagacatgaaaaaatgctcatcatcactgctcatcagagaaatgcaaatcaaaaccacaatgagataccatctcacaccagttagaatggcgatcattaaaaagtcaggaaacaacaggtgctggagaggatgtggagaaataggaacacttttacactgttggtgggactgtaaactgtttcaaccattatggaagacagtgtggcgattcctcaaggatctagaactagaaataccatttgacccagccatcccattactgggtatatacccaaaggattataaataatgctgctataaagacacatgcacgcgtatgtttattgcggcactattcacaatagcaaagacctggagccaacccaaatgtccaacaatgatagactggattaagaaaatgtggcacatgtacaccatggaatactgtgcagccataaaaaatgatgagttcatgtcctttgttgggacatggatgaagctggaaaccatcattctcagcaaagtatcacaagaacaaaaaaccaaacatcgcatattctcactcataggtgggaattgaacagtgagaacacttggacacaggaaaggggacatcacacaccggggcctgttgtggggtgaggggagkggggagggatagcattaggagatatacctaatgttaaatgatgagttaatgggtgcagcacaccaacatggcacatgtatacatatgtaacaaacctccacgttgtgcacatgtaccctagaacttaaagtataataataataaaaaaaaatcaagatgagggccagacacagtggctcatgcctataatcccagcactttgggaggccgaggtgggcggatcacctgaggtcaggagttcgagaccagcctgaccaacatggcgaaaccccatctgtactaaaaatataaaaattagctggaggtggctgttgcatgcctgtaatctcagctgctcaggaggctgtgacaggagaatcacttggacccaggaggcagaggttgcagtgagccgagatcgaaccactgcactccagcctggagatggagtgctctcctgagatggagagcaagactccatctcaaaaaaaaagagaaaaaatcaaggtgaggaaagaccctttctaattctagtttattgagtatttgagagtttttaactcatgttttttttgaatcaattttatttataatccttattgatcatcaaattgtccctcttttgacmgatgggatgatctccaattactttgtaatttacattctactcttttcatgatgatacctttattccactttcagagcactttgatagttcagtatttagggagcaagtttgtgttctgtttatctgggctgttctttgtcaattctatttgtaatctgtcatcatcatttcactctgaataatttcagtttttcaatgtatcctcctctaacttccacactccattatctccctctgttatgttaacaattagattgtgtcccctttctaaatcttgtctagtctataatattcttcttggatgataaaccagaactaaacattctgttacatttgcaaggcactattatttgatataagaacagagtgtygtaaattttcccccaattctatcatgtgtcaaactgtttcattgttaaacttatgtggttggaaagcaaaatactacaaccattttggaaaacagtttgawaatttgtttataattgtttataaagttaaacttacaagacctgcaaaacactaatgaaaaataaaagaagacctaaatgaatggagtggtataccatgtttgtggacagggagactaaaaaaaaaaaaatttttttttttgagacagagtttgttgcccaggctggagtgcagtggcacgatcttggctcactgcaacctgtgcctcccaggttcaaacaattctcatgtctcagcctcccaagtagctgggattacaggtgcccgccaccactcatagctaatttttgtatttttagtagagatggggttttgccatgttatccaggctggtcttacactcctgacctcaggtgatccacctgcctcggcctcccaaagtgctaagattacaggcgtgagccactgcgcctggtcaacaaaaatttttttaagagacatgatcttgcttggtcacccaagctgaagtgcagtagcacaatcatagcttactgtagcctcaacctcctgggctcaagcaatcctcctctctcagcctcccaagtagggaggactacaggagcacaacaccacactcagctaattgtttttcattttttatagagattgggtcttgctatgttgcccaggctggtctcgaactcctggcctccagcaattctcccactttgacctcccaaagtgttgggattacaggcatgagccaccgtgcctggcctcaatattttttaaatggcagtttccctcaaattgttcagtggattctgtgcaataacaatcaaacccaagattttgtagaaattgacattttaaatctaaaatttatatgcaaagacaaagttccttttttaaaagaactttgaaaaagaagaaaagaataagattcacactatttttctttacagtcgtcaatcaggagacacatgtaaatcactggaacatatagaatctagaaatagacccatatatgtgatcaattgatttttgacaatatgcaagacaattcactggagaaaagctagtcttttcaatacatgctcttggaacaattggacatccatatgtgaaaagaagaaacccaaaccatatcttacacaatatgcaaaatttaatgataaatggattgtatatttgggactttgggttaggtaaggatttttttagatggggcacaaacttcatgaacgataaaagacaaaagtgatgaatttcacctcatcagaacttaaaatgtctctccccaacactgttaagaggtgaatagacaagccataaacttggagagaaaattgtaaactacatatttgataaaggaatatataaatttataagtacacaaaaggaatttttaaaataatatattaaaaattctcagctaggcagggtggctcacacctgtaatcccagcactttgggaggcaaggtgggcagatcacctgaggtcaggagttcgagaccaccctggccaacatggcaaaaccccatctctactaaataaaaaaatacaaaaattagcccggcatggtggtacacacctgtagtcctagctactcaggaggctgaggcaggagaatcgcttgaacctggcaggtggagattgcagtgaactgagatcgtgccactgctctccagtttgggcgacagaatgagactctgtctcaaaaaaaaaaaaaaaaatcccaaaactcagtaataagaaaacaaaataattttaaaaacagttaaaagatttagaaaggcgcttgacctaaggcgatatacagaagtcaaataagcacatgaaaaaatgcccaagaccttagtcgttagagaaatgtgagttaaaataccagtacacgtgcattagaatggtggcaaggttaccgaacaactggaactttctgctgggaattacattgcttacattgctgctgggaatgcaaaatgttcaaccactttggaaacattatggcatacactgacaatacaaatcagaaatcctactgctgggtatttagtaaagataaatgaaaacatatgttcactcagaaatctgtatgcagctgtttatagtagctttatttataatcacctaaaactggaataatccagatgtccttcaactaatgtgattgcagaaattgtgatatagccatacattggaatgtattacttgacaataaaaagcaatgaactattaatatacccaataacatatataactttcaaatgcaatatgctaagtgaaagaaataagatttaaaaggctacttactgcataattctatttatattacataacattccagaatgtgcagaactgctaaggcaaaaaacagattaatggttgccaggagccaaggatgagaggaaaggattgctacaagaggcacaagagaacctaactttaaaaaaccagagggtgatttccaaagtcaaaagttaactctgcatgtgtatgtgtgtttgttcatgaacacagataagcatatatgttcttggccataaacttcctgtttcatcatcataagctaatgttaaatgctactgggaaatgacttttttaaattatatatgatcaaaaggagattaaaaggcgtatgtttattctttcaatttagaaaagaataaatgaatttttacttactctgtaaaactgaatgagaaaataattattctaagctcaaaagaaagttcatgtttcataaatgtctttaggggcatttacaattttttggttgttgctaattttagtttgttaggaattaagtatccttttgttttaaacctacccccaaagcatactgcttatactttgtccttaaacatatttttcttattcatttacaccttttctctttgttctatgcactttacctctttgataatgcatttacaaatttgtttgataattttctttccttcccatgcaactatggaccttaatcttcagaatctttcacttttagctcggcctggtggcatgtgcctgtagtcccagctactcaggtcgctgaagcaggataatcacttgagcccaggagatcgaggctgcagtgcactatggttgtgcctgtgaatggccactgtattctagcctgggcaacatagtgagaacccatctcttggggggaaaaaaaagaatcactcactttttaggccatttcaagaccctaggagggagttttggcacttttcacaggatcatatgtccctgtcaaatttatagaagtagacactttcaatatattaaaagatctcttttcagcacatcttcctcttctcatatttttccttgtgttttgtgatggagttatcaccaagtgttgttgggatcaggctaagaagaaattatattagcggtatgtttggtttggatttagtgggttatatttatgtatttagttaggttattgctagccaacctagtataggaatggcttccagaaataatcctggtaatgggtgagtggacatattgcagtgcgaacgtgtcttatggtgccagatgctgggaacatgtgagtactggaagagaagcaaggttgaaatgtagagagccagaggataatctgcgaataattctttcaattcttatagcttatatttgacagaaatttgatagagatttttttcaaatttgattataattagaaatatatgtacacacacagagtatgacagtaagttataaacttgaaataaactttaaaaaattatcattaataaacaacaaaattcgatcatccatgcttgagtaaagactgaagtatcctatttctcaaatattacaaagttattgtcacctgaagaggcagtcaaagcataagcagtggacaatgttgaaaaaacattatagatgtgataagtggttaattaaaaagtgttatttttctggatttaggaacatctgtaagcatttataaattttttgttttgtgtaacttgtgtttttttcattatagactcatatttgtacttcactttttattcgtaattctgtttaagtaacaaaagtgtctaactctaaaaagggctcattgtatctttactggccaattctgtcagtcaagttgtgcccatgcctgctaggcacttgcccctcttctcaactctgtatacaccccattttaaagcattgttttttagcatactgccaatgcatgaattatattcatgttactattctaagcattatgtatattttaaaacttacatgaaagagaagctaatttagaaagctgagataagaatacaatatgtagaggaagttccttctgcccctcagtgggttgacttgaacgcctctggagtctacccatccccacactttggagaccaatgctatgaagtgggagctattgaaggtattttttttttaagattctttttacgtcattgaattttaattacaaaagcattatttgcttattgtaaactttcagatagacaaagtgaaaacaaaatggggtaacaaaaccccagtttttcacgtaaacttttcggtctctttaactatgaccccgaagttaagcaatgtatcatatcttgatgtgtgttcttctggaactgtttccattattatacagacatacatatatacacacatctacacacatactacataatccttcatacccaacatattactctgagacttgcatttatcatttaacatatatcttcaacattcatcttaccccttacataaagatctaagtgattcttatgaatagttgcttaataatccatagttggcatgccccacagtttattcaaccatcccccaaacagtggatcttcccattttatatatgtaggaattgagaattaagaaaaataaaggccaaaacctaaagttaggaatgtttcctagtctcagaatctcctgcttttgtgtagctgcccccaatacacacacacacacacacacacacacacacacacacacacacacacaaaatagtgtgtaaatagcataggaaaataatcccaagaaatatatttaatataatttttatattattaggtaaaagttggcttttagtaaagcaagactttggagtcagactgcccaagttcaaatctcagcaccactattaccatccatgagatgttgggcaaattcttcaaattcagcaaatttaaagagactaaaggtttacaggtggcacctcttctagtcctccctaatccctcttatttcccctttgcaccccaaacatgaggctggggttttggcaaatgtgttattgtcaccactctttagaacaaacgccaccactagcattcgaagctctagatgaaagagatgtgggtggggagagtgggtaacaagaaataattcctctgaaccatggttcataccaggcatatggcgcttaggatcaactagtggcataagacccacgaggcaactagctgaaacttctctcaatagtgtaccctcccctggagcagtgaggaaatcctcactgttacagaccaggtcctggcactatgacacactgaaaatagattgctcagacttcaaaacagatctgcattttgggagtacaactgttggtactctgcaggaggcaagtgtggcctatgtggttagcctgtttgaagacaattgtgtgttgtctttgccagcatgtarcartcataccaaaaggcctccagctagcatactgcacacctgtacaatgtctcatgtaagtggagagtgtgcttaagaatccattttaatggcaaacactgcattttcaacaaaataaaacaaaaaccaccacctaccaacttcttcccaatattggtagttctgaatgttagattttttttgtgaccgtgtgatcaaagtatacctaagtgtatgaatggaaaaataggtgcagaacaggtattggcaagtattttcccatttttattagtgtgtgaatttttaatataaatatggggacatgatgcattaaaggaagtcaaaaaattttaatgaacaagtttcagcaattcaatttataacaattataagcaaatccgttaaaaatttttatatagtgacagcacttagattttttaaacaagtaaatttcttattgatgacaactaaatggtatgtgtataattttatcatacagtagattccattcattcactatacttatgtaattgactctacatgcaagtatatatatatatatatatwtttttttttttttttctcgagacggaatctcgctctgtcaccaggctggagtgcagtggcacgatctcggctcactgcaacctctgcttcccgggttcaagcgattctcctgcctcagcctcttgagtagctgggactacaggcacacaccaccatgcctggctaaattttgtatttttagcagagacagggtctcactatgttggccaggatggtctcaatctcttcacctcgtgatctgctcgccttggcgtcccaaagtgctgggattacgggcgtgagccaccgtgcccggctacaagtatatctttttaatattrtgtgtattgtttatgtttaatatttattttttaaaaagctaatgttaacgagttccacatttctcaaattgacacctatttgtgctaaaatacacccagtattttttatccagtaaaatgatagttacttaaattattaatattagtaatcataatccaacctaacaggaattttttatttgttaattattctctaacagctgttttcagtagtgggtagtatggacccctaggagatgattgggaattttatgggctggtattttggttgtcacattgatagggatatgttattggatcggttgtcctaatgtgtaagttcaattgatccactagatttcaacccttctgttaacatttgttcacagtacttggtgctttgagcttctaattttctgaaaggtctagagaataacttgtcttttgcaagcagtttaagttatcgcttcctttcttttgccaagtcagttaccacttttctatctgcattatgccttctaaatatttcttcaaagcacttattctctgatgtctcctctcattctctctttcatagtaattttgtgttcttttattttatccctttgctgtcaatccaggaaagggttagaaaggaagaagtatttcaaaggaagaagagaccaccatgtaatcaatctgctatgctttaacagccctattggagataatatctcctcctagagggcacagaaaatgttctgggtggttttggttattataatgactggctgatgcactggcagttcatgcctactttatggatagatctgctaaaacaccaccatgtgtgagcccactcaaaatgccaataacacccccatttacaaacagtgacctagtgcaattcacagtcatcagttcatcacagccttgcattaactcagtgtaaacagtatgcttagacactaacatcttctctagtttaaagcagtgtcaaatcttattcattactgtttttcaggctgagctttttgaaactaatattcattcagaaatatcartgaraacagtgtcatggctccttatcattaaaaggaagagcacattggataaattattttcttaactccagcattcaattttgctacatgttttgtcttcattttaacagatattttggtaaaagacctcagtgggattgtagaggggcatcaaatcttaatgaacttcaccagctattaagtgacataatgattagaagattaaagactgaagttttaacccagctaccccctaaagtcagacagcgtattccatttgatcttccatcagcagctgccaaggtgagaaccgttgcttgatttaaagtcttactttaaataattttgaattacactattaaagattatacgtatttcatatttcacagaaggaaaggtttgctttcttaaaataggtttaattaatagagcctatacattggttttgtatttcagcaagaaagcaggaagaattcaattttattcatcagatgcataaaaagatatggtaacctagtggtttaaaaaaaaagtatttttgctgaaaaaagaacttcaattgcaacagagatgtagtattaagaattctaaatatcggccaggcacggtggctcatacctgtaacccagcactttgggaggctgaggtgggcagatcacctgaggtcggcagatcacctgaggtcaggagtttgagaccagctggccaacatggtgaaaactcgtctctactaaaaatacaaaaattagttgagtgtggtggcgagtgcccgtaatcccagctactcgggaggctgaggcacgagaatcagcttgaacccaggaggcagaggttgcagtgagccgagatcgcgccattgcactccagcctgggcaacagagcgagactccatctcaaaaaaaaaaaaaagaattctaaatagaaggtgtgaaacccaataattagcaagggaaattgtgttccttgctctagaatttctttttaaagtatgaataactctcttctagaaaaacttcatgcagccctattcttgaaattctaaaactctgtgaycatgttgtaagacgtgaaattcagtatatcagaaaaccagtttactaatccttacctaatcctcatccatgtttacttttggagactgcagtgcttatatattctctgaaatttctgcaaatctgaaaatgactttattaacagagtttttcattgttatcttgaaagcttataagcattttgtaaacattgagcaatatgttacttctaaaataagaacaatctgattttcttatctattagtattagaaagaaaaataaaatggaatcaacatatgattatatttgtacttcatattaattttatttaatattccccatctttatttaaatcaaaccacatctttttacaaaagtacttagctgctttatacatttttactactctgctttcttatgtttcttatgttcattttacagaatgtatcttcttaagaagttataggccagggtgcggtggctcacgcctgtagtcccagcactttgggaggtcgaggtgggcagatcacctgaggttaggagttcgagaccagcctaaccaatatggagaaaccctgtctctactaaaaatacaaaattagctgggcgtggtggcgcatgcctgtaatccaagctacttgggaggctgaggcaggcgaatcgcttgaacccgggaggcggaggttgcagtgagccgagattgcacgattgcactccagcctgggcaacaagagcgagactctgtctcaaaaaaaaagaagaaattataattgtttgatttatgctgttagcaaagggctttgttttcacccacagcttatcattggtttctataattttgaaaatgtgactgacctacctctgcattgatgtttttaaatgaacatgttggaatctttggggattttctttttatatctttctatagagawaaggaaaaaaagtaggacatgattcatgattgcattaatttgttctgttcgttatgctatattcataaacagtgttattttttcccacataggaattgaataccagctttgaagagtgggaaaaaataatgagaactccaaattcaggtgccatggagacagtcatggggttgataactcgcatgtttaaacaaactgctattgccaaggtactctttgctgggccatcatgtatttgtcttcatacaaattattcaatgtcttttactgtttttaattaagcaagttatttatatattgcagaatttctttgctattgtttaactctttttttttttttttttgagttgggagcctcactctgtcaccctggctggaatgcagtggcgtgatctcggctcactgcagcctccgcctcccaggttcaagccattctcctgcctcagtctcccaagtagccaggactacaggcacatgccaacatgcccagcctgtttaactcttttttatggaaaaattcagacatactcaaagtaaacagtaatgctgtatccaaccatatatttatcttttccaatatacaggtatattttgatgcgggaggatactatacgttatactttctcatttaaattatatatatattcatttttttcttttctgttttttttttttttaaagacggaatcttactcttttgcccaggctggtgtgcagtggctcaatctcagctcactgcaacctccacctcctgggttcaagcaattctccttcctcagcctcccaagtagctgggattccaggcacgtgcctccatgcctggcaawtttttttttaatacttttagtagagacagggtccatcatgttggccaggctggtcttgaactcctgacctcaagtgatccacccaccttggctttccaaactgctgggattacaggtgtargccaccgtgcccgaactatattcatctttattattagtattcccatggttttactacattattactgcaaataatctttttttatttgtcagtcatcttcctttgatattccatgttcagtaccctacagaggtaattttgctcacattctgtttgtctaaaagtgaaaaatataggattttagaatttagtaaaattagtgtaactgtcaagtaaacttatcatatatttgtggtagttgtttttaccaccatggtagaacctgtaaatactgacgagtgtcacccctcttgattctgagattttttttgtaacatacttttttaagatgaggattgttgaggtatatttacataaagtgaaatttatccttttaaaatgtatagttggtccagacatggtagtgtgcatgtcatcctagttacttgggaggctgaggagggaggatcgcttagctcagaagatctgggctacagtgagctatgattgtgccaccgcactccagctttggcaacagagcaagactctgtctcaaataaaataaaataaaataaaataaaaataaaataaaataaaataaaataaaataaaaataaaataaaataaaataaaataataaaataaaataaaaaaataaatacaatgtatggttggatgaggcttgacaaatgtgtatagttggataaacatcagtaccatgaaaatagagatattcctgtcatgccaaaaagttcccccatgtgcctttgtagcatttcccctccacccatcactataccttggcaaccacagatatgctttctgtcactatagttttacactttccagaatgtcacaaaaatggaacaatagcatgtagccttgtgtctggctgctttcacttagcataaaggttttgagattgattcaggttgttgtatatgttattacttttcctttttattgctttccttacatcctccaatgtatgggaacaaaactttaaaaaaattttttttgagagacagagtcttgctctgtcacccaggctaaagtgcagtgccacaatcatagctcactgcagtttcgaacacctgggctctagggatccttctgcctcagcctcccaaagcgctggggttataggtgtgagctacctcatctggcccctaaaattttttttttttttattctttcacctattaatggacatttggaatatttctgttttagactattgtaagtcaaagtggtataatcattcatgtacaggcctttgtrtagtcatatattttcattttccttgagcaaatacttggaaatagaactggtgagtcataaaagtatagatttaacttgataaaaaaaactgccaaattgtttttcaaagtagctatattattttgcatttctactgacattgtatgagagttccatttgatatctttgtgagcactaggtattgccatctttttcattttagccgttattgtcggtatgtagtggcatctcatcgtgcttttaatttttcttttcccgaygactgatggtgttgagcatgttttttggtgccttttgtctattcattttcttttgtgaagtatctgttcatattgagtccatatttatatggggtaataagaactctttattttggaaacaagttctgtaatatatatatcttttacaaatatgtcctccaagtctatggatttgatttctattttattaacattgtctttcagagaacagaagttttaaatttggaaacaatctagtatatcaatttttttcttcctttttttttttgtattttgagtcctaagaaatttttgcctaatctaagttcacaaagataccctcttatattttcttctaaaaatgccatagctttaggttatcagtcatgtgctacttaatcaaatttcagtcaacaaagcagcacatatacaacactggtctcataagattataatggagcatatatagaaacataataaatggcacttgacattgcattgcagatcaagtaggagaaataattggtattcagtaatgatgctaggtcctttggtttttcatatgaaaaatatatatataaataaaaatacatataacatataggtttgtgtaaatacactctgtgatgttctcacaatgacagcattcccttaacaatgcatttctgagaacatatcccatagctaagtgatagatgacttagatgtaggtctataaactattatttttgtagcatataattcttttatatgctacaaaataaaggtagcagttctgatttttttatttttgttttggtttgtcattttacatatggattttcagttgttacaacactcatcaaaacacagaagactattttgccctccttaaatttccttggcaccttcaccaaaaaccaattggcaatgtatgtgtaggtctgtttctgaactctattctcattcattggtctattcatcagccttatactacaatggcttgattactgtagctttataataagtcttgaaggccaggcacggtggctcatgcctgtaatcccagcactttgggaggccgaggcaggtggatcacttgaggtcaggagtttgagaccagcctgaccaacatggcaaaaccccatctcyactaaaaatacaaaaattagctgggcgtggtgttgcacacctgtaatcccagctactcgggaggctgagacaggagaatcacttgaacccaggaggtggaggttgcagtgagccgagatcatgacactgcactccaacctgggcaacagagcaagactctgtctccaaaaaataaataaataaataagccttgaaattatatagtgtttaccctactgtattccttttcaatattgctttgtcttttgtaggtccttcgcttttctgtatgaattttagaatcagcattttaagtgtatacaattttgttggaattgtgttggatctgttgactaatttggaagaatttacttctgaataatatttagtcttctggtccctgaaaagagtatcgttcacttttaatttatccccacaatgttctctagtttttttaatacattttgttagatttatccataggtattttgtgtccttttatgctcctgtaaatggcattttttaaaatgtaaatttccaggtttcccttgctaagtatagaattattatcgattttcttatattaaccttttattctgtgaccttgctgaactccttttattagttcttgtggatttttggttaattctagaagatataggatcattttgtctgcacataaagacatttttatttcttccttgtaatatatatgccttttatttatttgttttgcctattacgttgaaggaagactagtacaattttggatagaaatgataggactgaacagccttaccttgtagccaatcttagggggaaggcatttagtctttcaccattaaatatgatgttattgcggctgggtgcggtggctcacacctgtaatcccagcactttgggaagccraggcaggcagatcacgaggtcaggagatcaagaccatcctggctaacacggtgaaaccccgtctctactaaaaaatacaaaaaattagccaggcatggtggcgggtgcctgtagtcccagctacatgggaggctgaggcaggagaatggcgtgaacccaggaggcagcgcttgcagtgagccgagattgcaccactgcactccagcctgggcaacagagccagactccatctcaaaaaaaaaaaaaaaaatgatgttattactaagtttttttagatgacttttcttatgtagaggaaacttcctttttttactagtttgtttagagaagaaatggaacatatgaactttttttcctttggcggagaaggggaagaagaggtggttattataaaggtggatatgaagaaaatagctaatgttctagcactactataagtgaaggaattaggcttttatgaatgttcactcaggcatggtggcttacatctgtaatcccagcactttgggaagccgaggtaggagagtcccttcagcttaggagttcgagatcaggctgagtaacagaggaagacctcgtctctattctataaaaaacaaacaaaggaaaagacaaaacaaacaaaaaagaacaaatttttttcagaaacaaaatttaaataaaaaaggaaaaaagatcacaataaaagtggtcctgacacaggggagtttatactcactcacaggctttatttccactggcatctagcaggtgctagctgggagtcctgagagcatatccattagtggagcagaagttcaaaactctgcctattttcaatacccctttcttacactaaacaaaagccttaagccattgtggaagaggcagagtaccccctcctccaacctcaaagcctagtccatgatggactgcttctggtgatgggatagggacaaatgctgcctacccctggggagtgggcaggaaaccctgttggactcaggaccctgcactgatataagacagagatctgttactgccagggtagaggcagagacccctttagcaccacctgcagttacaagacatagttttgttagtggtgggggacaggaacaccaagaaagtcccacccccaaggctcagctgcagcaaaaaatttgtcttatgctgagttggtaccaggagactcaaaaggtcccccaacccccactatgaacttaacactgagaaaccttcaagatcaatctaccactgggaaagagagacaacctactatcctacaggcgtgcaggactactgaaagctgagaatgtggcaggaacacttagcaaaacccttgacacacagtattacaagctagaagtatcccattgctgggggaatttgaggttcatggtgctccaaaggtaaatgtaacaagagaacctaaacagaactcagcgctgactacattcactcagtcccctcccccaccatactatcatcacctcaaaggaagaagcatgctcaattctggatgtaactatcatttcctcagtctgtactatccttctacacataactcctagcattcaatagaaattgcaaaataacaaaaaagacatttaaaaaaacaaccattgccaagacataaagcaactgataaagccagatgcagaaatgacccagattgtagaactattagacaagggctttaagatagctatgaataatatgttaaagcatcaaatagaaaagataaacaacatgcaagaaaagatggagaattttagaaatagtatgaaaattgtaaaacagtaaaatggaaatgctagaaatagaaaacacagtatcagttatgagccaatagtggaaataaaatgtaatcataaaaaatctggccgggtgtggtggcttacacctgtaatcctagtgcttcaggatgctgagacaggcagattgctcgagcccaggaattcaagaccagcctgagcaacaaggcaaaaacccatctctactgaaaatgcaaaaattagctcagtgtgatggtacacgtctgtggtcccactactcaggaggttgaggtgggataatcacttgagcccaggaggcagaagttgcaatgagctatgatcatgccactgcactccagcctggacaacagagtaagtgagaccctgtctcaaaaattaaaaaataaataaagtaaaataaaataaaattcattaattaaaacatttgactggcacagtggstcatgcctgtaatgccagcagtttgagaggttgaggtgggaggattacttgaggccaggagttagagaccagtctggccaacatggtgaaaccccatctctactaataaatacaaaaataagctgggtacagtggctgatgcctgtaacgccagcacttttggaggctgaggcaggaggatcacttgaggtcaggagttcgagaccagcctgaccaacatggcaaaaccctgtctctaccagaaatacaaaaaattagccaggtgtagtggtgcttgcttataatcccagctattcgggaggctgaggcaggagaattgcttgaacccaggaatcggatgttgcagtgagccaagattgcaccactgcattccagcctgggcgacagagtgagactctgtcttaaaaaaaaaaaaaaaggccgggtgcggtggctcatgcctgtaatcccagcactttgggaggccgagacgggtggatcacgaggtcagaagatcaagaccatcctggctaacatggtgaaaccctgtctccactaaaaatacaaaaaaaaaaattagccgggcgtggtggcgggtgcctgtagtcccagctactcgggaggctgaggcaggagaatggcgtgaacccaggaggcggagcttgcagtgagccaagattgcaccactgcactccagcctgggtgacagagtgagactccacctcagaaaaaaaaaaaaaaaaaaatcagtcagatgaaaaaagaataaaaagggatggggaaagcctatggaataccataaagtgtccaaatatttaaatttggggtattccagaaggagaagagatgggcaaaggcatagaaaaaatatttaattaagtaatagtttaaaacttcccaagtctagcaagagctgtagacatccagatacaggaagctcaaagacttatcaaatagatacaacctgaaaaggtctgcaaggcacattgttgtcagaagtcaaagacaaagggagaattctaaaagcagcaagagaaaaacatcaaatcacatataagggaatgttcaacagagtaaaagcagatttctcaaaagaaaccttacaggcaaggagacactaggataatatattcaatttgctgaaaggaagaaaaaaaaagctttcagccaaaaatactatacccaacaaagctatccttcaaaagtaaaggagaaataaaatatttcccagacaaggaaaaactgaaggaatttatcatcactagaacagccctataagaaaaacttaaaggagccctacacctggaaaaaaataattgtatctaccatcatgaaaacacatgaaagtacaaaactcattggtagagcagatacacaaatgaggaaaagaaaggactcaaatgttactactacagaaagccaccaaaccacaatgataaaaaataagagagaaagaaaggaacaaatgatacagaaaacaacrataaaacaattaacaaaatggcaatcctcacatgtaaaacataacgttaaatgttaatggattgaattattcactttaaagatacagactggctgaatggattgttttaaaacaaaaaacatcacccaactatatgctgcctacaagaaattcacttcatctgtaaagatacatatagactgaaagcaaagagatggaaaaagatgttccacacaaagagaaacctaaagtgagcaggaatagctatacttatcagaaaaagcaaaccttatgtcaaatagtaaaaggggccaggcacagtggctcacgcctgtaatcccagcactttgggaggccaaggcaggtggatcatatgaggcctggcaaacatggcgaaaccccgtctctactagaaatataaacattagccgggcacggtggcacacacctgtaatcacagctacttgggaggctgagccaggagaattgcttgaacctggggaggtggaggtttcagtgagccgagatcgcaccactgcattccagcctgggcgacatagtgagaccccatctcaaaaaacaaaaaaaaagaaacttgaaactgattgttttgaacgaataaaacttgtaaaacttaaaacaaaaatagagaagaaagtaatttacccatgtcagcagtaaaatagaataaaaagactgtcactacagaccctataggcattaaaaagataataagagaatatcattaacaactttatgtcaagaaagccaacaaaatttatatgaatatatagattccataaatatcacagctgactcaaaaagaaattaaaaacctaaatagccctgtatcaactagaaaaatttaattcataataaaaatcataatgaaaatttgaggcctcaatggtttcactgctatattccattgaacatttaacataaaaagtaaaaccaattctaaaaatttcttaggaaatgaaagagaaatacctcccaaataattttataacttcaggattactctgttaccaaaaccagacaaacaaaataatgagaaaactataggtcagtgttcttaatgaatgtgaaagtccttaacaaaatattagcaaattgaatccaccagtatgtaaaaaagtataccagcaatacaaagtttaacactgaattaatcactgtaaatcatcacatgaacaatataaaaattgaaaaccatatgattatttcaatgtaagcatttgacaaaattcaatatccattcctgacaaaacctgtcaacaaatcaggaatagaaaggaacttctttatcacaataaaaggcatttatgaaaacttacatctaacatcatacttaatgcagaaagactgatgctcttcctctaagatcaggaacaagacaagagagcctttcctcatcacttccctttaacattgttctggttctggtcttagctgtgcattaaggctagaaaaagaaatacaaggtgtacatatcaaaaagcagtaagtaaaattgtccatattcacaggcaggattatccacatagaaaatcgaagagtgattttatcaaggtcmcagaattcatgttcaacatataaaaatcgtttctcgttctgtatactggcaataaaaattggaaactgaaattttaaaaatacgatttgaaatagcatccaaaatcatgaactaatttagaataaagtcaacaaaaaatatgtactgaaaactacaaagcattgtttagaataagtaaagcaaatttaaataaacaacagatagattatgttcatgaatcagaagagtcaatattgttaagatgccagttctctgtaaatttttatattcaatgctgttaatcaaaatccttgtagtcttttttgcataaattaacacactaaatataaaatttatgtggcaatacaaaggacttactatagccaaaacaattttgaacgagtcacactacattatataaatacttaataagaagttaattaatgaatcagaaaaagagagtccagaaatagaacctcacatagattgtcagttgatctgttaagaaaggagacaaggtaactcaatagggaaattatagttttcagtaacgggtactaagacaattggatatccataaggaaaaaaagaagtcttgaacattatttcacaccacacataaaaattaacttgaaatgagtcatagaattaaatatgagagctaaaattataaaattcttaggagcatacatatgtaaaaatattcccaacttttgggtaggacaatgttttagacaggatacaaaaagcacaaactttgaagaaaaaattgagattaaaaacttgaacacatggtggtaaaaaatatatatatacgtagtatgaaaaatactgttaggaaaatgaaaatgcaaaacatagattggaagaaaatattttcaatatactctccttgttccattttcccatgtcttaattttcagtttgatcataattttttgttagatcagtgttcattgtttacagtataataactttgttaaacatctcactgttgagctataattaaatttttttctttgactgttgtttttcctagagttaataactctcttgttttttgcttgtttgcttacttagctttctttgtatataatactgaatacagaatgcttgcttaaggaaaaagaacatatatgagaaccttttagatcrtttcttgtctgtggttaaaaaaccctagttggggccgggcgcagtggctcctgcctgtaatcccagcactttgggaggccaaggtgggcagatcacgaggtcaggagttcgagaccagcctggccagcatggtgaaaccctgtctctactaaaaatacaaaaattagccgggcgtggtggtgcgtgcctgtagtcccaggtacttgggaggttgaggcaggagaatcgcttgagctcaggaggtggaggttgtagtgagctaagatggtgccactgcactccaacctgggtgacagagcgagactcccatctcaaaaaaaaaaaaaacaaaccctggtttgaagtcagaagcgttgacaataaataggaatctggcatctaattcctaggattcttgaaggaaaagaaaagagatgaaaagtagttgtccctaaattaggtaatgttcccaaagattaatggcagcagaaggccaatccttgcctccccagttccctagagtttttagtcatttttcattccctctctaatagaacttctgtcctcaaccacctatggaaattggaactgtgtatttctattcctgagctacagccagaaataattaattcaagctatgaccaaattggaattcttaatacattttccccagaaatattactgatatttagtagagtctatagtaactgtgaataatacagtttacctacattatagattaaataggcttttcaggaggtagctagttatcatctacatttaatgttgattctgtgagaaaatgagtttcagagttctcccaaaccagtttgtaaatgaacttgaaatagcatagattataatttgattattatattgtatgtataccagtgttggtgcttcttttctttgattaaatgttttcctattaattcagtacatatttattgattgcctactatgtggcaaggtgctagggaggtatggtgaacagaatgtcttcctctcaaggaacttgcaatctactggggaagaccatgaaataaatattcagctacaatagtgtgtatttagtgcttcaaaaacaggatgcttatgaaagtacatgagagaagatacctggcccagtcttgagggtgcaggaaagacatcccaaggaatgaacaaataagatttaccctgtcagagggagggagtaaaatggaaaggagatgagctggtggaatgtatttcaggcaattgaaacagtttgtggaaactcacagaataaccggaaagacatattcagggaaccaaaagtaggtcaacatgcctgaagcatacagtgctagggaggaattctccagcctgggcaacatagtgagaccacacctctacaaaaaattaaacatagctaggtgtggtggctcatgcctgtaatcccagcactttgggaggcctaagcgggcagatcacttgaggtcaggagttctagatgaacctggccaacatggtgaaactccatctctactaaaaatacaaaaattagctgggcatggtggtgcgtgcctataatcccagctactcgggaagctggggcaggagaattgcttgaacccaggaggcagaggttgcggtggggtgagayggtaccactgcactccaacctgggcaacaagagtgaaactctgtctcaaaaaaaaaaaawaaaataaacatattaattgggcatggtggcatgtgcctgtactcccagctacttgagaggctgaggtggaaggatcacttgagcccagaaggtcaaggctgcagtgagccacgatcgtgccactgcattctagcctgggtgacagaggaagaagaggaggaattcctcttctcaaaaagaagaggaattctgactgagactaggctggaggtcaatgagagctataactacattatgaaagtcacagttcatagtttgtaatttattctaaaggttcttagcagtcaggtacagtggattggagtacaataatcagatttgggctttagaggaataactagctgtgtggagaatgtattggaagcaataactaataggcagagaatccacttaggatgctcactgataatctagatgaacaatgctggtgatctaaaccaatgtagtggctgtatcatatcttaactgggaaaggaataattcatgatagattaaggcagtgcaatcagtagacattggtgattgactgaatgtggaagggagggaaaaggtcaaatctagatttcttgcttggtcaactgggttgatatttctgccattcattaaaattgtgaaaaaataggagatatattttgtgcccagacccccattaagcataatctgtgccaaacacaacaaggtgcaagctgttagatagtagaaattttctttgtactctgtagcatcattttagaaatacttttgttttcaatgaatcatttgaaaaattatgttgaggaatttgaagataatttaaagccacctgatgatggtttttttaaaatcttcataagaataagaaggaaaaatttaaagagaataatgagttttcaagtaaatagatgggtgcaaatatgcagctacttataggatatgctattttaagggcatatacttaattattacttatagtaaaatgaattcctcattatttgtggtgtttagtttttcaaaggctataattccataataaatacataaatgtatgcagtatgaaatcttgttcttgtcaaactgaggaagtgaatactttctctattcttttttttaacactgttcactaattgtggttagagagcattgggcctagagagtattgagtcatctttcctcttcctttgctctagacagagttatgcctaaagccttccaaacaaatgggtctctatccatcctaattttatagatcttcaagataaaagatttctttctctgctgtaatcttttctttgcttcataacttacacactgttctaggcagacaataggatagtacagggcttcaaattaggtcatgtcagcaaattaggtcatattgttaataaattttaatatgtacaacgctatgctacagaattatggtattggcatatattatttatgtgctatataaacatttatgctagtctgccttttgaagtacttcttaggaggacaaagtatattttaagtatgtttgttatctccttagtggtgttattagattatcaaggtctctttttcagatagttcttaaagaaaacaaataatggtaatgataaatagtaaataatgacgatagggagggcttccagtggaactgggaaagggccacaaggagaaggaaacttccagctgaactctaataatttcgacctagtgcaaattttcctggacaaaaacctggggagggggatggtgctcaaggagaatgggaagtgcakatacaagcacagaagaagctataggcagagcaggggaggcttgtagcctggggcargagctgcctggatgtaaactcagtgctttccgtggagcacagtgggagtgagactggccttgctggctgcctgggagctggataaggcctgtcactgcaggctttcccccacttccctggagacctgtatgacacagcagaggcaaccataatctccctaggaacataagtccattagcctgagaaccacactccaagcccccacagtggatgcagcagtcccagcccaaggagagtctgagctcagacacaactaaccctgcgacctgatggtcttctctaccctccctggtaagagaagacaaaagacataatctcttagaatctatatagtcctgtccatcgcccgagaaagtggaatacttgtccagggactttagacaagcttgtatgccccctatactgctgcagctgatgttctcttgaaagcaccccctcctrgctggaggccagccaactcaagccattacagcgactcagaacaaccgtgctccaaaaaaggaggaaacaacaggtaatcccactgcctgtaacatcctggctaacctgagatcctcagtctgtacatgtgacaaattcactgctagcacaaccagcattcaagaaaaccagtgcactaaacaaaactacaaccaaggaccctcacagagtccatttcactgccctactatcttcagcagagctggtgatagtatgcacagctgagagacctgaagactgatcacatcacaggactctttgcagacacttcccagtaccagcccagaggccagtagctctactggggtggctagacccataagagcaataacaatcactgcagtccagctctcaggaaggcccatctttaggggaagggggcgagcaccacatcaggggatcaccctctgagacagaagaatctgaacagcaacccttgagccccagatctttcctctgacatggtctacccaaatgagaaggaaccagaaaaacaattctggtaatatgacaaagcaaggttctttaacatccccaaaagatcacactagctcaccagcaatggatcaaaaccaagaagaaatctgaagtgccagaaaaagaattcagaggtcaattattaagctactcaaggaggcatcagagaaaggtaaaaaccaacttacataatattttgttgtttttgagacagagtttcactctgtcacccaggctggagtgcagtggtacgatcttggctcactgcaccctctgcctcccgggttcaagcaattatcatgcctcagcctccccagtagctaggacaacaggtgtgcaccaccacacccagctaatttttgtatttttagtagacatagggtttcaccatgttggccaggctgatattaactcctgacgtcaggttatccacccacctcagctctgtaaagggctgggattacaggcgtgagctaccaagcccagccaataaattttaaaaacaatacaggatatggacaaaaaagtctccagagaaatagatatcgtaaagaaaagacaatcataacttctggaaataaaagaaacacttagagaaatatataatacactgtaaacttacaacaatataattgaacaagtagaataaagaacttcagagatcgaagacaaggctttcaaattaatgcaatctgacaaagacaaagaaaaaagaatttttaggatggcygaataggaacagctccagtctacagctcccagcgtgagcgatgcagacgacgggtgatttctgcatttccaactgaggtaccgggttcatctcactgggtagtgctggagagtgggtgcaggacagtgggtgcagygcacggtgcatgagccaaagcagggcgaggcatcgcctcacccgtgaagcgcaaggggtcagggaattccctttcctagtcaaaggaacgggtgacagacggcacctggaaaattgggtcactcccaccctaatactgcgcttttccaatgggcttcacaaacggcacactaggagattatatcccgcacctgtctcggagggtcatatgcccactgagccttgctcattgctagcacagcagtctgagatcaaactgcaaggtggcagcgaggctgggggagggtgccccccattgccaaggcttcagtaggtaaacaaagyggccgggaagctcgaactcggtggagcccaccacagctcaaggaggcctgcctgcctctgtaggctccacctctgagggcagggctaagacaaacaaaaggcagcagtaaccactgcagacttaaatgtccctgtctgacagctttgaagagagtagtggttctcccagcacacaacttgagatctgagaatgggcagactgcctcctcaagtgggtccctgacccccgagtagcctaactgggaggcagcccccagtaggggcggactgacacctcacatggcagggtactcctctgagacaaaacttccagaggaacgatcaggcagcagcatttgcggttcaccaatatctgttgttctgcagccaccgctgctgatacccaggaaaacagggtctggagtggacctccagcaatctccaacagacctgcagctgacggtcctgactgttagaaggaaaactaacaaacagaaagggcatccacaccaaaaacccatctgtatgtcaccttcatcaaagaccaaaggtagataaaaccacaaaaatggggaaaaacagcagaaaaaccagaaacactaaaaatcagagcgcctctcctcctccaaaggaacgcagctcctcaccagcaacagaacaaagctggatggagaacgactttgacgagttgagagaagaaggcttcagaagatcaaactactcagagctaaaggaggaagttcgagccaatggcaaagaagttaaaaaccttgaaaaaaaaaattagacgaatggctaactagaataaccaatgcacaaaagtacttaaaggacctgatggagctgaaaaccatggcacgagagctgcatgacgaaggcacaagcctcagtagccgatgcgatcaattggaagaaagtgtatcagcgatggaagatcaaatgaatgaaatgaagcaagaagaaaagtttagagaaaaaagaataaaaagaaatgaacaaagcctccaacaaatatgggactatgtgaaaagaccamatctacgtctgattggtatacctgaaagtgacggggagaatggaaccaagttggaaaacactctgcaggatattatccaggagaacttccccaatctagcaaggcaggccaacattcaaattcaggaaatacagagaacgccacaaagatgctcctcgagaacagcaactccaagrtacacaattgtcagattcaccaaagttgaaatgaaggaaaaaatgttaagggcagccagagagaaaggtcgggttactcacaaagggaagcccatcagactaacagcagatctttcagcagaaactgtacaagccagaagagagtgggggccaatattcaacattcttaaagaaaagaattttcaacccagaatttcatatccagccaaactgagcttcataagtgaaggagaaataaaatcctttacagacaagcaaatgctgagagattttgtcaccaccagacctgccctaccagagctcctgaaggaagcactaaacatggaaaggaaaaaccagtacaagccactgcaaaaacatgccaaattgtaaagaccatcgaggctaggaagaaactgcatcaactaatgagcaaaataaccagctaasatcataatgacaggatcaaattcacacataacaatattaaccttaaatgtaaatgggctaaatgctccaattaaaagacacagactggcaaattggataaagagtcaagacccattagtgtgctgtattcaggaaacccatctcatgtgcagagacacacacaggctcaaaataaaaggatggaggaagatctmccaagcaaatggaaaacaaaaaaaggcaggggttgcaatcctagtctctgataaaacagactttaaaccaacaaagatcaaaagagacaaagaaggccattaygtaatggtaaagggatcaattcaacaagaagagctaactatcctaaatatatatgcatccaatacaggagcacccagattcataaagcaagtccttagtgacctacaaagagacttagactcccacacaataataatgggagactttaacaccccactatcaacattagacagataaacgcgacagaaagttaaccccagctctgcaccaagtggacctaatagacatctacagaactctccaccccaaatcaacagaatatacattcttttcagcaccacaccacacctatcccaaaattaaccacatagttagaagtaaagcactcctcagcaaatgtaaaagaacagaaattataacaaactctctctcagaccacactgcaatcaaactaaaactcaggattaagaaactcactcaaaactgctcaactacgtggaaactgaacaacctgctcctgaatgagtattgggtacataatgaaatgaaggcagaagtaaaggtgttctttgaaaccaaygagaacaaagacacaacataccaaagtctctgggacacattcaaagcagtgtgtagagggaaatttatagcactaaatgcccacaagagaaagcaggaaagatctaaaattgacaccctaacatcacaattaaaagaactagagaagcaagagcaaacacattcaaaagctagcagaaggcaagaaataactaagatcagagtagtactgaaggaaatagagacacaaaaaacccttcaaaaaaatcaatgaatccaggagctggttttttgaaaatatcaaaaaaattgatagactgctagcaagactaataaagaagaaaagagagaagaatcaaatagactcaataaaaaatgacaaaggggatatcaccgccgatcccacagaaatacaaaccaccatcagagaatactataaacacctctatgcaaataaactagaaaatctagaagaaatggataaattcctcaacacatacaccctcccaagactaaaccaggaagaagttgaatccctgaatagaccaataacaggctctgaaattgaggcaataattaatagcttaccaaccaaaaaaagtccaggaccagatggattcatatccaaattctatgagaggtacaaggaagagctggtaccattccttctgaaactattccaatcaatagaaaaagagggaatcctccctaactcatcttatgaggccagcatcatcctgataccaaagcctggcagagacacaaaagaaatgagaattttaaaccaatatgcttgatgaacactgmtgcaaaaatcctcaataaaatactggcaaaccgaatccagcagcacatcaaaaagcttatccaccatgatcaagtgggcttcatccctgggaagcaaggctggttcaacatacgaaaatcaataaacgtaatccagcatataaacagaaccaaagacaaaaaccacatgattatctcaatagatgcagaaaaggcctttgacaaaattcaacaacccttcatgctaaacactctcaataaattaggtattgatgggatttatctcaaaataataagagctatctatgacaaacccacaaccaatatcatactgaatggacaaaaactggaagcattccctttgaaaactggcacaagacagggatgccctgtctcaccactcctattcaacatagtgttggaagttctggccagggcaatgaggcaggagaaggaaaaaaagggcattcaattaggaaaagaggaagtcaaattgtccctgtttgcagatgacatgattatatatctagaaaaccccatcgtctcagcccaaaatctccttaagccgataggcaacttcagcaaagtctcaggatacaaaatcaatgtacaaaaatcacaagcattcttatacaccatcaacagacaaacagagagccaaatcatgagtgaactcccattcacaattgcttcaaagagagtaaaatacctaggaatccaacttagaaaggaagtgaaggacctcnnnnnnnnnnnnnnnnnnnnnnnnnnnnnnnnnnnnnnnnnnnnnnnnnnnnnnnnnnnnnnnnnnnnnnnnnnnnnnnnnnnnnnnnnnnnnnnnnnnnnnnnnnnnnnnnnnnnnnnnnnnnnnnnnnnnnnnnnnnnnnnnnnnnnnnnnnnnnnnnnnnnnnnnnnnnnnnnnnnnnnnnnnnnnnnnnnnnnnnnnnnnnnnnnnnnnnnnnnnnnnnnnnnnnncatcacactacctgacttcaaagctatactacaaggctacagtaaccaaaacagcatggtactggtaccaaaacagagatatagaccaatgggacagaacagagccctcagaaataatgccgcatatctacaactatctgatctttgacaaacctgagaaaaacaagcaatggggaaaggattccctatttaataaatggtgctgggaaaactggctagccatatgtagaaagctggaagtgggtcccttccttacaccttatacaaaaattaattcaagatggattaaagacttaaatgttagacctaaaaccataaaacccctagaagaaaacctaggcaataccattaagacataggcatgggcaaggacttcatgtctaaaacaccaaaagcaatggcaacaaaagccaaaattgtcaaatgggatctaattaaactaaagagcttctgcacggcaaaagaaactaccatcagagtgaacaggcaacctacagaatgggagaaattttttgcagtctactcatctgacaaagggctaatatccagcatctacaatgcactcaaacaaatttacaagaaaaaacaaacaaccccatcaaaaagtgggcgaaggatatgaacagacacttctcaaaagaagacatttatgcagccaaaagacacatgaaaaaatgctcatcatcactggccatcagagaaatgcaaatcaaaaccacaatgagataccatctcacaccagttagaatggcgatcattaaaatgtcaggaaacaacaggtgctggagaggatgtggagaaataggaacacttttacactgttggtgggactgtaaactagttcaaccattgtggaagtcagtgtggtgattcctcagggatctagaactgggaataccatttgacccagccatcccattactgggtatatacccaaaggattatcaaacatgctgctataaagacacatgcacacgtacatttatttcggcactattcacaatagcaaagacttggaaccaacccaaatgtccaacaatgatagactggattaagaaaatgtggcacatatacaccatggaatactatgcagccctaaaaaatgatgagttcatgtcctttgtagggacatggatgaagctggaaaccatcattctcagcaaactatcgcaaggagaaaaaaccaaacaccgcatgttctcactcataggtgggaattgaagaatgagaacacatggacacaggaaggggaacatcacacactggggcctgttgtggggtgggggaaggggggagggatagcattaggagatacacctaatgttaaatgacgagttaatgggtgcagcacaccaacatggcacatgtgtacatatgtaacaaacctgtatgttgtgcacatgtaccctaaaacttaaagtataataataataaaattaaaaaaataaaataaaataaaaataaaaaataaaaagaatttttaaaaatgaacatagcctccaagaagttggggattacgttaaacaaccaaacctaagaataattaagaatggccaggtgctgtgactcatgcctataatcccagcactttgggaggccgagggggctggatcacttgaggtcaggagttcaagaccagcctggccaacatgttgaaaccccgtatctactaaaaatacaaaaattagctaggtgtggtggcacacgccagtaatactagctacttgggatgctgaggctggagaatcgcttgaatctagaaggcagaggttgccttgagccaagatcatgccactgcactcactccaccctgggtgacagagtgagactctgtctcaaaaaaaaaagaattaagaataattggtgttcccgggccaggcgcagtggctcacgcctgtattcccagcactttgggaggccgagacaggtggatcacctgaggtcacgagttcaagagcaacctggccagcatggtgaaaccccatctctagtaaaaatacaaaaaggaggctgaggtatgagaatggcttgcctctctgggaggcagaggttgcagtgagccaagaacataccactgcactccagcctgggtgccagaataattggtgttccctaggaagaagaaaagtctaaaagtttggaaaacttatttcggggaataatcaaggaaaccmtccctggccttgctagagatctagacatccaaatacaagaagctcaaagaacacccaggaaattcatcgcaaaaagatcatgaaactagatcttgaaacaaatccttgaaatacaccaaaacagaacctccttaaagcataaatctcacagggcctgtaaaacaatgacacaatggggtgggggtggagggggggagcccaaggtattcaggcaacaactagcacaattaatagaatagtacctcacatctcaatactgacgttgactgtaaatggcctaaatgctgcgcttaaatgttacagattggcagaatgaataagaattcatcaaccaagtatctgctgtcttcaggagactcacctaacacataaggattcacataaacttaaggtaaagcggtgcaaaaagatagtccatgtaaatggacaccaaaagtgagcaggagtagctatccttgtatcagaaaaaaacagactttaaagcaacaacagttaaaagagacaaacagggacattatataatgatgaaaggactagtccaacaggaagataccacaatcctaaatatgtatgcacctaacactgcagctcccaaacttttgaaacaattactactatacctaagaagttagatagaccacaacacaatataggggaacttcattactccactgacagcactagacaggtcataaagacagaaagtcaacaaagaatcaatggactgaaactataccctagaataaatggacataacagatatgtacataacattctgcagttgtaccctagaacaaatggacttaacagatatttagagaacattctacccaacaactacagaatatacattatattcatcagcacatggaacattctctaaggtagaccatatgatgggccacaaaacaagccttaataaatttcagaaaatcgaatgtttttgtttttgtttttgagacagggtctcactttgtcacccacactggagtgcagtggcagagtcttgactcaccacaacctctgcctcctgggttcaagcaattctcctgcctcagcctcccatgtagctgagattacaggcatgcgccaccactcccagctaatttttgtatttttagtagagatggggtctcactatattggctaggctgatcttgaactttggtcctcaagtgatccacctgactttgcctcccgaaatgctaggattacaggcttgagccactgagcccagccaaaaaaatcacattgtatcaagtactctctcagaccacagtggaatgaaattataaatcaactccatggccgggcacagtggctcacgccagtaatcccagcactgtgggaggctgaggggggtagatcacaagttcaggagttcaagaccggcctggccaacatggtgaaaccccgtcgctactaaaactgcaaaaattagccgtgcgcagtggcaggcacctataatcccagctgcttgggaggctgaggcaggagaatcacttgaacctgggcggcagaggctgcagtgagccgagatcacgccactacactccagccttggcgacagagtgagactccgtcttaaaaacaaaaaaagaaatcaactacaaaagaaccctcaaaaccatgcaaatacatgaaaattaaatagtstgttcctgaatgatcactgagtcaacaataaaatcaagattgaaatttatagattctttgaactgaatgataatagtgacacagcccatcaaaacctctaggatacagcaaaaacagtgctaagaggaaagatcatagcattaaatgccggcatcaaaaactgtgaaagagcrctaataagacaatctaaggtcatacctcaagaaactagagaaacaagaacaaaccagacccaaacccagcagaagaaaagaaataacaaaagtcagagcagaagtaaatgaaattgaaacaacacacacacacacacacacacacacacacacacacgataaatgaagcagaaacaagttctttaaaaatataaacaaagttgatagactattagtgaggctaaccaagaaaagaagagagaagatccaagtaggctcaattagaaatgaaaaaggagatactacaaccaataccacagaaatacaaaagattatttaaggctgctgttaacacctttatgtgcacaaactagaaaacctagaagacatggataaattcctggaaatatacaacactcctagattaaaccaggaagaaatagagactctgaacagaccaataacaagcagcaagattgaaatggtaatttaaaaattgccaacaaaagaaagttcaggaccagatggattcacaactgaattggtaccaattctattgaaactgttccraaagataaagtgggaatcctccctaaatcattatatgaaggcagtatcaccctaacaccaaaaccaggaaaggatataacaaaaaatgaaaactacagaccaatatttctaatgaacacagatgcaaaaatcctcaacaaaatactagctaaccaaatccaacagtatatcaaaaagataatccaccatgatcaagtgggtttcatattagggatgctgggatagcttaacacacacaagccaataaatgtgatacaccacctaaatagaattaaaaacaaaaattacatgatcatctcaatagatgcagaaaaggcatttgacaaaatccagcatccttttgtgattaaaaccctcagcaaatcatcatagaggggacatattttaaggtaataaaagccatctatgacaaacccacagcgaacattataccaaatggggaaaagttgaaagcattcccccctgagaactggaacaaggcaaggatgcccacttcaccacttctattcaacatagtactgaaagtcctagccagagcagtcagacaagagaaagaaataaagggcatccatgtcagcaaagagaaagtcaaactgtcatggtttgccaatgataagatcgtatacccagaaaaccctaaagactcatccagagagctcctagatctgataaatgaattcagtaaagtttcaggatacaaaatcgatgtacacaaatcagtaacattgctatacactaacagtgaccaagccaagaatcaagtcaagaactcaagctcttttataatagctgcaaaaaaaaaaaaaaaaaaaaaaggaaagaaatatacctaaccaaggacctgaaagacctctacgaggaaaactacaaaacactgctgaaggaaatcacagacgacactaacaaatggaaacacgtcaacacatcccatgctcatggattggtagaatcaatattgtgaaaataaccatatggccaaaagcaatcaacaaattcaatgcaattcccatcaaaataaccatcatcattcttcacagaagtagaaaaaacaatcctaaaattcatatggaaccaaaaaagactcatcatagccaaagcaagactaagcaaaaaagaacaaatccaggggtatcacattacatgactttgaactgtactgtaaggttatagtcaccaaaacagcatggtacttgtataaaaatgggcacatagactaatggtacagaatagagaacccagaaataaagccaaatatttacagccaactgatcttcaacaaagcaaacagaaagataaagtggggaaagaacactctattcaataaatggtgctgggataattggcaagccacatgtagaagaatgaaactggatcctcatctctcaccttatgcataaatcaactcaagatggatcaaacacttaaatctgacctaaaaccataaaaattctagaggataacattggacaaccccttctagatattggcctaggcaaagagttcatgaccaagaacccaaaagcaaatgcaacaaaaacaaagataaatagatgagacttaaataaatgtaaaagcttctgcacagcaaaaggagcagtcagcagagtaaacagacaacccacagagtgggagaaaatcttcacaaactatgcctccaacaaaggactaatagccagaatctacaaggaactcaaacaagtcagcaagaaaaaaataataataataatcccatcaaaaagtgggctaaggacatgaatagacaattctcaaaagaagatatgcaaatggccaaaaaaaatgaaaaaatgctcatcatcacgtattatcagggaaatgcaaattaaaaccacagtgcgataccaccttattcctgtaagaatggctatcatttaaaaatcaaaaaataaggccgagtgcagtggctcacgcctgtaatcccaacacttttaggaggccaaggcaggcagatcacttgaggccaggagtttgagaccagtctggccaacatggtgaaaccccgtcactaccaaaaatacaaaaattagccgggtgtagtggtgtgtgcctgtagtcccagatacctgggaggttgaggaaggagaattgcgtgarcctgggatgtggaggttgttgtgagccgagattgtaccactgcactccagcctgggtggcaaagccagactccctctcaaaaagaaaaagaaaatggaaaggcgtaagaatgatacaatgggactttgggaacttggggaaagggtgagaggggtgtaagggataaaagactacacattggatgcagtgtacactgcccaggtgatgggtgcaccataatctcagaaatcacacctaaagaacatatccatgtaaccaaacaccacctgttcccccaaaaacctaataaaataaaaataaataataaaacaatggaacattttttaaaataatgatgataaatagtaaaggaatgaaccaaaaataatcaatgttaccagtacaaagtcaactattggagaatctctgataattaggacaattacttttcttctatatcattatttttgttgctttgtaatgtatgttgagaatacaatggatgaaaataaacaaattcttcagatttgtgatcagcataatattctcctagaaaaaaaacagttacatgtgttacatatggtctagccatctctcaattcaagtacattacaacaggcacatcaaaacaatgccttatttttagaagaaaccattttgggagaaatgccagttatttttctatgaaaaggattaaagccaacccataatttaaaatttcttatctctagagggatggcagcattccttcgtgccttaacaactttccagaaggcaaattactttaaacacgttttccttatgcacaaagtgtgtttcctctttaattgcctcagcagcttagcacaggtggaatcctatttataatattcagtgaggtataatgaggccactgcaatattccctgctgcacagggtctgggaagatatgagactgaagagtgcttcttcttgtgccagttctgtagtttcggaaaggatctctggctctgaattggggacactctgcctcctcttcattagcaggaaagtcagcaataatcaatacagtgcaaataaaataataatgttaccattttagaggatgaaagagtatattaactatatggagatgtggcatggaggaaggctttattaaagataaggaaataatccacttgagtgttgtaaggtttttgaggtggcaagaatgggtaggttggaatcacaaatagaggagtttaccatagaaaaagaagaaataacctctttgccaggcgcggtggctcatgcctgtaatcccagcwctttgggaggccaaggcgggtggatcacctgaggccgggagttcgagaccagcctgaccaacatggagaaaccccgtttytactaaaaatacaaaattagccaggcgtggtgttgcatgcctgtaatcccagctgctcaggtggctgaggcaggagaattgcttgaacccaggaggcagagattgcagcgagccaagaktgcaccgtggcactccagcctaggcaacaagagcaaaactctgtctcaaaaaaaaaaagaaaagaaaagaaaaaaagaagaaataacctctcttgttacaaaaggaaaggaagtgaggatgagtaaagtaaggaaaggtggccgggtgcggcggctcacgcctgtaatcccagcactttgggaggccgcggtgggtggatcacgaggtcaagagatcgagactatcctggccaacatgatgaaaccccgtttctactaaaaatacaaaaaattagccgggcgtggtgacaggcgcctgtagtcccagctactcaggaggctgaggcaggagaatggcgtgaacccgggaggcggagcttgcagtgagctgagatcgcgccactgcactccagcctgggcgacagagcgagactccgtctcaaaagcaaacaaacaaacaaaacaaacaaggaaaggtaacagaattctcagatgtgattctgttttctttgggcaaggggtggtttgaaagccaggagtcataggttatgatttcaaaggaagtggaagaggttgaaatagtttttgcattttactggagaaatatgctaataataagagctaatacttttataatgttcactatgtgccaatcactaatccaagcatatttcatggactaacttatttaattttcaccacaaccctatgcggtgtaggtacttttatcttattttatagatgagaaaattaaagcacagagattaagtgactttctcaatgtctctcacattgtaagtgatggagctaggattcaaacccagactgtctggctccacagtccatgtgcttagccatcattcaacaaagatagcttaatagacataatatttgttagtgaccatggattaatgtgttacctgtttttctattagtgattttttttaagggtcagggtctcgctcttgttgcccaggctggagtgcagtggtgtgatcatggctcactgcatcctctaacttccgggctcaagcagtcctcccaccacagcctcctgactagctgggactacaggcatgagccatcatgcctggcttcctattagtgatttttcaacatccctaaataggcatggaaaagatacagactttaaagtctgtacattctgtgtattttgatttttaacacccaaataaggtgtattctgtactttagtaggacaaagttgattatcttattgtcatgactagtggatggagtttagaaataaatcaagaatgtttttaaaaattgaattcagttttttttttttttttagacagagtctcgctctgtcaccaggctggagtgcagtggcatgatcttggttcactgcaacctgtaacctctacctcccggcttcaagtgattcccctgcctcagcctcccaactagctgggactacaggtgtgcatcaccacgcccagctagtttttttgtattttagtagagatggggtttcaccatgttagccaggatggtctcgatctcctgacctcgtgatccacctgcctcagcctcccaaagtgctgggattacaggcgtgagccaccgtgcctggcctgaattcagttttaaaagaattagattagctgttttgtttgtttgagacagggtctcactctgtcacccaggctggagtgcagtggcacaatcacagctcactgcagcctcaacctcccaggctcaagcaatccttctgccccagcctcccaagtagctgggaatataggcacatgccaccacacccggctaatttttaaattttttgtagatacaggcacccactatgttgcccagtcttgtctcaaactcctgggcttgagcagtcctcctgccccagcctcccaaagtgctgggattataaacatgtgtcgctgtgtctggcctagattagctgttttgatcagtgacttttatgatcaaacctccatgaaaataacttttttaaagctcataatactattggctttactttgtcaaaatttgggtaaattttgggtaaatggaattaggtcattcacaggaatgttctcatgtatccttgccaaattgatagattgattgataatgattgccttattataacttgttctgaaaaccttatggaaagatttaggatcccagggtttttttgtaaaactatgctggttaagatattaaattggaattgccttcttcacaaggtattgtatcccatctacttttcagcatgctgcttgtggaactccatcagtgtcaaaagattaaatgtattagaggtattagatttgtatttgcagatatatttataaggaagtaaaatactccttgagataagaaaataatacttttgatagttcactggaaccatcttttgaagtgaaactagtgtttctttgggaaaatttgggcatgaggctctgtaaaaatgttcaaagccctgacattatggtatggaaactgccagtcttctcctgaaggctgtctcctaccagatttggaaatgtttactaacagatttgaaaatgttttttcaggctaatgaaaaagtttctaaattaaaaactattggcaaagggggaagggataccggaagacaatgtctagccttccttttgtggtgagctgcagaagctaggtggggagtaaataaacaatgcatattctcctttactttggtacttggctctgcttatttaagataattttaaaggatagtaagtaaatcaactatcacaaaataaataagttattaaggaacagtataaggtgagctagataaatgaataaaaataagagagtatatcaactgatgggtaaataaaatgcatatatattcatacaatggaatattatttgacattaaaaaagaaatgaagtgctgatgtatgctacaacatggattggaaaccattacactaagttaaagaagctgtctcagaaaacacatattatatgattccatttatatggaacgtccaaaagagtcaaatccatagagacagaaagttaattaatgtttacctagagctgaaatgatgggcaactggggtgtgacagctgagaggtaaaggaatcctttttagggtaatgaaaaggtcctaacattgttaggttgtgatttttgtgatgatacacaattctgcaaatgtactaaaagccattgaattgtacactttaaaagagtgaattttatggtatgtgaattgtatcccagtgaagctattttttaaaaaagagagagaacccaggttcttctgtcttctgttgtctgacccagttcactgcttgccctcaacagctcctattatagccccaagatgactgctgcattccgggatatcagatatcaagtgcagcctataatgtccaaagcaaggaaaagtgttcctaagagtgcctttgtcagggaggatgtttttttgaaacccccagcagactcctcaggtgtcatattagtcagaatcatttgcaggggaaaggaaaatgctaggtttgcttagaccaatcacaatttacctgtgactaagaagacattaaaagagctttaaaaaaaaaaagagcttaaaaggtcatgcgatacctgaacaaaactatcatttgattgggttctgaggacttcaggacttaaagggaagcttcctttgtgctcacactctcttagctgcaagttatagctgttaaagaaaagattattctgacttgttaaaacagtagggaagactactcaagactattgcagtagaggtcaactcttttgcaatagacgagagaggttgagctcaattccaaacacaaggacaagtagagatttatagccagcaagtaggttgagagagttgatgaatggaaaattactaagaggagacatcaagggtaaggggattcttgctaaagacaggccaagggtttatacatcaaaggtacggaataaggaactagatccaatatcaagagtggggggattttcactgaaatgacttagtggggttcctataagactgggctatgcaggcctggcaaggacaggatggacactgaaggccaaggtgagggcttagttgcaaagagggctcaggggagcctaactaaagttaggtcaaaggagagtctttgtcatagctcargtttgaagtttttgtctttcttttttttctttcttattatttgtttaaaagccaacaatttgaaatcaaataacttttaacaggtctttagtgcaatacagatttttctttaactacttttacttcagaaagtaagatgtgtacatcttcactgaaaaaaaaatcatgaatattctcttcattgttgtattttatttaatttatttatttattttttgagatagttttactcttgttgcccaggctggagtgcaatggtgtgatctcagctcaccgcaacctctgcctcccgggctcaaatgattctcctgcctcagcctcccgagtagctgggaccacaggcatgtgccatcacacccggctaattttgtatttttagtagagatggggtttctccgtgttggtcaagctggtctcgaactcctgacctcaggtgatccacccaccttggcctcccaaagtgctgggattacaggcatgagcccccacgcctggcctgcatttttttaaataagatataatgtatagtcttcattaattacttaaattagatcttcgactaacaggcttattactaacagatcaattctagtaaaataaaatagagttttgaatacatgcattttctgcaacttctgtgaaacctgaacygacactaccaagatgctgattattatgaggacctgctattccacatactatgtacttaagatcgtttggaagcaaattcctgttcagataatttaaaatctgatgatgcagtgatagtttttattaggataaaatcaaaatagttaaaatgcatgcatagtacattttaaaatgaaaatctatgtaatccccatcttaagaacctaagagaatcccaaaagttcatttgttacttttgatgttttggtattcccaacacattttctcctaaaaagcaatatcacaaatgatggttaaattgctttgttagtcctaagagcctatttagtcagttatgtaattgaactttataataatgttagtaaccgtaaacctttttgaagcactagtggaaaggagtgggaaaaggggggcttgaactttggcattggcatctctggttgtgatggaagcaggtgatatcagtggaggagactctaagaaaaattgctcacttgggaagaggagggggaatccatccgagactagaggtttagcaattatatagtttgtaagtctggactggatagtaatgaatgtaccttaaaagtactccatcttgacatgtacattttgaaaggcttatcacagtaaatatagctctttaggcaaatatgcactttattaaagtggttcagttgccatgacaacatatccagaatttatagctccttattttgacagtacttcacttccactttccaaggcactgaaatccaaggctaaagttcttaacagcccctactctcattgtatgatgaatttctgtggtttagaaaacttagacatgcaaaatgtagtttgcagaatctgtcatgtgactttatagtcatatgtatgaattttaagtaggtatttttcagttttgaaatgcctcctttttaattttttattattgccaaagctacatagtatcatagtttaatgaccagagatccaaaaaataacagtcccctaaccttatttctcaaaggcaacaaccttcttttctttcagctgattttttttttagtatttacttcaaatccctcaacaccatacttatattgctgctttgtttgtattactatttgctttgtaattttagctgtcatcaattggcttcttaatacggaagattaaattttagccctgtcccctattgccccactctcacacacatatcttcctgttatttccatccttccatgaaagtcataatcatagttttactgattatataggaacttattaccaattttggcttgatcagtattcaccatgtttattattagaaccatatttataacatttacaggtgaaacatggtatgctatggatacgttttcttccacaactcattttattttctttggcattaataattataaaggtttttcttttcttcttttattagttttctgtgtagttgtcactaatccatcctcaaagtttcccctagttatttaacctcctcccaatatctttaaacattaagcattgtattaatctcatcttcttaaagaaatttcacctgattccttctgattagctccagtctgaactgttactctttaggcctgctgcagagctctcatcctggagatttttacctctttcctttatatattattttctttctttgtttacttccttgttttgttggagcattttgtccagtagcctcccaagaaatggtatattggaagcaaattatttgcattccttgcatatttgaaaatattactattctatctgatttttaattagctggatataaaaatggggaaatcattttctctcatttctggtattggtattgagaaatccaatacaattcagaattgttattctattttgattctatgaaatcttttcttcgcttttctggaagcttatagaatcatttctttgtcccagtgttctaaaatttcttgataatgagcctcgttctgggtctattttcattcaatgtgaaagacacgtagtgggtcttttccatttttcattttggaaactcatgcccttcagttatgtagaactttatttctttgatgatttttgttagttttctctgtttgttttctgagacttttattattcatatattttcatatattgccctcatgacctgatcccctacctaattattttacattttatatttgtttttyttttttgttttttttttgagacagagtctcactgttgcccaggctggagagcagtggtgtaatctcggctcactgcaacctccacctcccaggttcaagcgattctcctgcctcagcctcccaagtagctgggattacaggcacgtgctaccacacccagctaatttttgtatttttagtagagacggggtttcaccgtgttggccaggctgttcttgaactcctgaccttaagtgatctgcccgccttggcttcccaaagtgcttggattacaggcgtgagcccccgcacctggcctatattttatattttctgtttactttctgggagatttccttagcttaataaccaatgaattatccatttctgctattatatttttcatttctgatagtactgtttttcttctttatatctgttttttttgtagcatactgatcttgttttataaatgcaatctcttccagttttcttagctctgtatatgtgatccgttcatacatgttgctttctacaaatatctattgatctttggttggttgcttatatttacaagaaagacactaaccactgactagaagctctgcgcatgtatacaatttatagactgtggccttcaataaatggtgatctgaatgggatgtctccctgggaaacccctgatagcagtatmtttagttttttctcttggctggtcagattccttagaaaagaatcactttatatgattctgctctcttgcctgaaggacataagcctgtttctgttttgggaagtataggggaaagaaggctgggacagaggggcagatctcagcatttattttgtaactttcatgtaatccccatgagttttgtaggatatacctatcatcaatataggattcctccatccaaataccctctattttatccactccagagaataagtctgtagttttctaccagaatggttatggtagttacctattatatggaataggtagagagaaggtaaatagcagtattgcacataatcaactacttaaacattatttcagcaggtcctcctaaccacactcctaccccccattccagaggtgtcattttctgaacctttttaggtgactgcaacgtaaatcaagtgcttctccactttccatagccagtttaggatctgtgagattggttaatcagttatcagtcattatctgctttttagcttccaaagttttgttgctattgacttttctccagttctctttgtccctttacacttgctatcttttaaacatagcattgagaaggagcagaagttaaatgtggtcagcctggtatctttttccacaatttctacataaccagtttttaaaagttaaaagatacatagattttaaacttaattcatgctatcctctttaattcgtatttgcttcatatcaaattgatttttcactcttagtaagtaacttggcctcaagttacctgttaatctgaactttttaaattttcttccttctgtgtcataattgttctatatgtccccctgttctctcagacctcactaccgttgtcttcatcccatcactccagcctcttctggaaccttctccatcccagagataagctaaatgacctcatttccatttctcttaatctgtgtactccttgaactgcttatttgtaagtctacctaagtttcttaagtaaaaaaaaaaaaaaaaaaactttccttaaaccttaagcttcagtccctgatttcttactgttttcaatcttcccttttaaaaaaaaatgctcttcatctgatttttttgctttctgttttctccttaactctgttctacttggtcttatatataaacttttttgaaaatcaccttctaaacaaaactgccaactccttcttggccatagcctacttgactacctcctttccattgaaacccattgttgtgttgttttttaattcttctaattcttgtcttcttctcatttaattgctcagtttttccccttcttgtccctcttcttttacattttccttatatgtgggcttctacttccttaggctacctagagaacaatgcagctaaaagttcatatttactgattttcaagccatttttcttgctttattaaaagtgacataaattttaaataatcatttttatgacactaataaggtttaccttttaatatttaggcaggtgctgtaaaggattatattaagatgatgcttcagaatgattygcttaaatttctggtttttgctcaccatttaagcatgctccaagcttgcacagaagcagtcatcgaaaataaggtatgttgccattttttaactaaatactttttagaatgcatatttttactatactaaacatcagttgtagtctcatagttgaggtgttttttgtcttctttagatgatggtatataaattatcacacatttttcttgaaaattatattaatattatatgatgatgattatatactattaaattttctcttttcttaactgatctcataattttccactgaccaaattatctggattgattaaagatatgctgccatgccagccgccccatctgggagggaggtgggggtcagcccccgcctggccagccaccccatctgggagggaggtggggggcagcccccgcccggccagccgccccgtccgggagggaggtggggggcagcccccgcccggccagccgccccgtccgggaggtggggggcgcctctgcccggccgccccttctgggaagtgaggagcccctctgcccagccgccaccccgtctgggaggtgtacccaacagctcattgagaacgggccatgatgacgatggcggttttgtcgaatagaaaagggggaaatgtggggaaaagatagagaaatcagattgttgctgtgtctgtgtagaaagaagtagacataggagactccattttgttctgtactaagaaaaattcttctgccttggaatgctgttaatctataaccttacccccaaccccgtgctctctgaaacatgtgctgtgtccactcagggttaaatggattaagcgtggtgcaagatgtgctttgttaaacagatgcttgaaggcagcatgctcgttaagagtcatcaccactccctaatctcaagtacccagggacacaaacactgcggaaggccgcagggtcctctgcctaggaaaaccagagacccttgttcacttgttcatctgctgaccttccctccactattgtcctatgaccctgccaaatccccctctgcgagaaacacccaagaatgatcaataaatactaaaaataaataaataaaaaataaattaaaaaaatttaaaaaaaggttgctaaaaaaaaagatatgctgccatgataggctataatgtgaattttatttttgttcctggatataccgttttagagtggtgtagacagttaaacgttagactttttatttacctacacagtggcctttgaatgtgggtgacatagagaggaaagaaagaatgaacttggccaatgttagtacccaactgcagtcatactatttaaacttccaggcaatatatggaaaatgattactaaaatttagtgtagatgtatttgaaacatatggcccaagtaatttatcaggttagctccatcaagccatgtggctttactgcatcttcttaggtctaccttgatttccaatagtccaccagtgagtgacaacatcttcctttgtttctatcaaagataaaaacttagtatacattgtttaaacattaggtaatatgttcattaatattaccaaagacatacttctagtgtttccttcataggaagagttataataaagtgctatacattaaaaggtactttctcattggttatcatatagtttctgaaaaacaccctctaagagttaattaacctwaatattttttaaatgattgggcaagaaattagattcgtaatatttttcttattctgattccattataccttaaaactactgggatcgattccaagtataatagtctttttttcttacatccattttactgatatgtttagaatcccatttagctttactaagagttaaaaatgtagatataggccaggtgcggtggctcacacctgtaatcccagcactttgggaggccgaggcgggcagatcatctgaggtcgggagttcgagaccagcctgaccaacatggagaaactctgtctctactaaaaataagaattagccgggcgtggtggcacatgcctgtaatcccagctactcgggaggctggggcaggagaatcgcttgaacctaggaggaggcagaggttgcagtgagctgagatcccgccattgcactccagcctaggcaataagagcaaaacktcgtctcaaaaaaaaaaaaatgtagatattcatggggttggaggtgaatttttccccaacttttcctaccctgacaatgtattttctttagaaagaccctgagagaattttataatcttccttaatggctattaaatggtttactggttaatgtatacttgctctttgaggacagaacgttaatacgggacattctttttaataattaacttggatattcccttataaaagtgaatattcatatgttccaactatttaaggctatattttctatggcactacatacatgaataaggttttttgaaatttaggagttatcatttttagaagttgaataatgatttctttttttcttttttttttcttttttttttttgagacagtctcgctcagtcgcccaggctggagtgcagtggctagatctccactcgctgcaagctccgcctcccgggttcacgccattcttctgcctcagcctcccgagtatctgggactacaggcgcccgcaccacgtccagctaatttttttgtatttttttagtagagatggggtttcgccatgttagccaggatggtcgtgatctcctgacctcgtgatccatcctcctcggcctcccaaagtgctgggattgcagaagtgagacaccgcgcccggccaataataacttctttttagctattctaacacatagtgataacccccttgtctcaactcaaatcattcttaaagacaacaatgttcggtttaacacttaatgtttccctacttttcaaaaatgtgtgtgggtgcctcagtgccccacctctctggagatgaccatatcacatatttctttaaagtttaataatgtgaaaaaccagaattaaaagctctattttccagccgggagcgatgaggcgggggaatcacgaggtcaggagatggagaccatcctggctaacactgtgaaaccctgtctctactaaaaatacaaaaaattagccgggcgtggtggcgggcgcctatagtcccagctactcaggaggctgaggcaggaaaatggcgtgaacccggaggcggagcttgcagtgagcagagatcccaccactgcactccagcctgggtgacagagcaagactccgtcacaaaaaaaaaaaaaaaaaagctctattttcccagttaatatttgggatatttcagaaataaatgtactactcttcatgaatccgtgatttgtgggcagaatcatctttctcttttctcacatgtctggctgtattttcactttagaattagtgatcttataactttagagttagtctgatccatggtttaaagtttgcgtgtcaatttacgtagaattttactgaagacaacattagcttaattcataaaagatttgtggagcttctgctatatacaaggcattgcccttggcattgatgggataaagatgaattagacatagactctaccctcaagtagcttaaaagattaaaaaaataagaaattgttataagaagctattaaaaatcttggttaagattcttcttgtataacatttaccaatctgtcaccttaaccaagttccattttgttatgtgaccataaaaataagctgtaaaatatataaaatgagatgggtacatagggccttgtcctaattttgccgttttccttgttgatgctagactcgttacattaggatagatggaagtgtttcatcttcagaaagaatacatctggttaatcagtttcaaaaggatcctgacactcgcgtggctatcctaagcattcaggctgctggccaggtaagaaatttcaagtctaaatttggttatgaaatgtcattgaaataagaaaaaaggccattcactataactttggtttataaacttgtaactttgtatctggatgccttgtataataaatagtaattcttcttcagagagttccagaaagtataatagaaagaggcctcgatgtctttgacacagatctcctaaattttcaaggaaaggatgtctttgaaagaatatactttcaaagaagagtaagaagagtatagttaatttgattgtaatatttttgcctgaccttttttccttcctttgaatttgtataggcttttcttatacctgtcttatatccaacccttcacttacttgattgtgttgcattaggacctgtatgacaaggtggcctgggggaaaagaactcttgtctcaggactttttatggagtgcttctgttttgtcccttaggattaagtttgaaggcaagtaaacagaaattcagattaagactgacttaaatacacaaagtttaattctcttatgtagacagtccaggcctagcctgatgtttgcacaaagtccttaggacctataccccttctcgctttctgctttaccactcttagcaagtatgtcttatctaaaagggctgctagagctccatcttatctgcagtctaagcagctgcctggagaaaagcacactgcatctcttatagttagtcccacaaccacacctaatttcaagggaagctcggaagagtattctttattccacgtagccctgctaaaaattgggtgttatgttacaaaggaataagagaaggatagatattagggaaagtaatggcagtctctgccacagtaggtaagaggggatcttctggactgtttttctgccagcattctaaaatactttgttgtaaatgtctaagctaggatatttaacatagggaaaagtaattgagcatactgctgttcagccaagctggtacatgccaaagatctgcttttactcggctaattaaagtatataaaattatatacagagagaaactttatgaggatgaagcagttccacaactctctgggagttctaaccaaaaggagggttgtctcaatgcttccctcatgttcagttaaacttccaataatcggagttatttatctgttagactgttccagccacagagaatatcatcaaaaagggcttagaattagaaatgaagtacttagagctggggaggtgctaagtaggagaaagccagacaggagagtctaggaccttttgaaattaataatgtatggggcacttacattttattcaaggctgtgcttctgaagaccttatataaatcaagactcatatacttgaggactgatatctccataggaataaaggaaagtagaaaggtctttgttcttggtactgtgaatcttacattatagtttagcagctgcttagagtggtattgatcttgccaacatattttccctttatgcttgtataatcaaatgatgttttttataaaattaaagatgtctctccttaaatactactttttattttttcagcattatttctaatattctgtggcattttcagtcctaaatagcagtacagtttaatatatttgtctctgtatttttattacctctaacttctttttcagagactgattttcagtaaatttttcagcttgagaactagtaccaccatttaattaatgctagcatgattttgttatgtgacatgaaaatattttaagtgaaaataacatatcaaaataatagcatagcagtcacaaaagtcactcataggagtttggtgcatatgaacaacaaacagcattgattaaataatactcaaaaaaaggcagatatttctgtttaccacctaatgtcattttactgctatatggctatagcataagcgtggttcacatttcattcagcctaccaacattaaagtcatgcatttttggacacattttttagtttgacacattttttagtttgaggattttgcattatttcatatattgattataaagcaagacttagttaatatttttatgtcacactatttcaaattcatgaaaatgcagttgtacagaaaatgcaattgcattgtatatattgagacataggcagtaaatttcaggtcttcggaatataacatcacaggaagaaagtagtataaccagagacgttgttttcttgctttataacatgacagtgtgagttagatgaagaggatgtaaatgctctctgcctggttgctatagataccatatgttggaaattgtattctcatttataaagtattttattagattttccagtggtaatgtgaatccgttcatcatcagagaataaagtgatttagtttatatacttacatcaagctgacttttgaaattttgaaatacctttcaaatgtgttttttgtagttcacctagctatgttgcattaaacattcttcatttgcctttcatgaattaaatcttaatttggcctaaaatagacaactaatttgttttcaagtccttcagtgttctccatttaacatgttcagaaatactttattatatattggctgtatgttacattctcaatttayttgctttatttcacttagggattaacatttactgcagcaagtcatgttgtatttgctgagttgtactgggaccctggacatataaaacaagcagaagaccgagctcacagaattggccagtgcagttctgtgaatattcactaccttattgcaaatggaaccctagacacccttatgtggggaatgttgaatcgcaaggtaaagcttgaatttaaatcaagttagcagcttacttactattaaccatagccaatgtgagttaagaggctgagttttagtgttttcaggcaaaggatacttaagcacatcaagataatgatgataatagagaccaagttaagaaaaggcttcagtagtagtaccttgtctgctctcctctgtaataagagaggcatgaacttccacgtactcctgttatcttccaagcccttctactactttagaggtacaatgatggggttggctagcaaggaaacgtaatgtttcaagccccaagtcctttgcgtaacctaagaataaaccttttctagaagaattcttgagttccaagctaattttggacagaaggtagcctgtacccagactctagaaaatgtaggaatgacattgcttgctctgtcctctcagctgtctcatttcctcagtcttgacaatgtttatagaaaggacttgactaaggattagatgatttctggctgggcgtggtggctcatgcctctaatcccagcactttgggaggtcgagatgggtggatcacctgaggtcaggagttcgagactagcctggccaacatggtgaacccctgtctctactaaaaatacaaaaaaattagctgggcatggtagcaggtgcctgtaatcccagctacttgggagcctgaggcaggagaattgcctgaagctaggaggtggaggttgcagtgagctaagatcgcaccattgcaacaattgcactccagcctgggtgacagagcaagactctgtctcaaaagaaaaaaaaaagggttagattatttctgggttagtttgtttgggcagccataacaaagtaccaatctatattgggtagtttataaataacagaaatttatttctcatacttctggaggctagaagtctgagattaggatgccagtatggttgagttctggtgagggccctcttccaagttgctgactactgctttctcwttgtggaaagagggcaagaaagctctttggggtctcttttataggggactaagcccattcatgagggctccaccctcatgacccaatcacctcccaaaagccccacctccgaacaccatcaacattgggagttaggattttaacatctgaatttgggggggatacaaacattcagcccatagcactgtttttcaatgaaatgttttttaagcactggatataaatatttaaaatggccgatcatatgttggttaagtttcaaagcatataaatattagaataaaagtttttatgaagaaagtgaatagtataacttctccagttaaaccttttctcattaagcatggaaccattgactgggtaatggattataattttggataattattgctatggtttgaatgttcattccctctaaaacttactttgaaacttaatccccactgtggcagtattgagaggtgggccattaagagagatgattgaccttctttcccaccctcttctaaaaaaaagaaaaaaaatgattgggtcatgagggttctgcccttatgaatggattaatccattcatggattgagggattaatgggttatcataggagtgggactggtggctttataggaagaggaagagagacctaagctagcaccactcagccccttccccatgagatgacctgtgctgtctcagaactccgcaggtacccaccagcaagaagccctcaccagatgtggcccctcaaccttaacttctcagcttccataagaaataagttcattttctttacacattacacaatttcagatattctgttataagcaaaagaaaacagactagatgtcaatgaagagtcaaactgtaaaatattttaagagatttattctgagccaaatatgaatgacagtggctcatgacacagccccaggagattctgagaacttgtgccttagatggttgggctacagcttggttttatgcaaggtggggtggagggaggcattggttccagatcataggtggattcaaagattttctgattggcagttggttgaaagagtttatctgaagacttggaatacctgggttaagataaggagttgtggagaccaaggttcttcttaggcaggtaaagcatccaggtagcaggcttcagacagaatagattgtaaatgtttcttattagactcttttttttttttttaagagatggagtcttgctctatcgcccaggctggagtatggtggcgtgatctcagctcactgcaatctctgcctcctgggttcaagcgattctcctgcctcagcctcctgagtagctgggactacaggcgcccgccaccacgcccagctggtttttgtatttttagtagagatggggttttaccttattggccaggctggtctcgaactcctgaccttgtgatccgcccacctcagcctcccaaagtgctgggattacaggcatgagccaccgctcctggcctcttattagactttaaaagstgccagactccttagttaattctttcctggatcaggataaagacctggaatggaagggggattctctacagaatgtaaatttttcccacaaaagacagctctgcagagccatttcatacaaaagaaatatgttagggagtaaaaggtttcaatttgttttagggcctgctatctgtcatgttggcatcttgttgctacaaagagtctgttttgtcagccttaagatctctattttaatgttaatgctggtcagcttttttgagacagagtctcactgtgtcacacaggagtgcggtggcaggatctcagctcactgcaacctccgcctcctgagttcaagggattcttctgccttaccctcccaaggagctgggatcacaggcgcctgccaccacgcccggctaatttttctatttttagtagagatgggatttcaccatgttgggcaggctggtctcaaactcctgacctcaggtgatcgccccccttggcctcccaaagtactgggattacaggcatgagccactgcacctggcgtgtttcaggtttactttagaatgctcttggccaagaggaggaatccattaagttggttgggaggcttataattttatttttggtttacaaagataattatattactaaagcccatgatatgttggaacagtaagattttcttagtgggtagcttatgatttaaatgcaaaatcaagttacttagtgaatttcagctgtgaggtgaactgctcaaaaattcatttactttttcctcttgtaggctcaagttacagggagcacactgaacggtaggaaagaaaaaattcaggctgaggaaggtgataaggaaaaatgggatttcctgcagtttgctgaagcttggactccaaatgacagttctgaagagttaaggaaggaagctttgttcactcacgtaagattatatgccttactcttttctattttttttagtatcctgaaactataactttgtatgtatggttttaaatagcaactctcaattatttatggtgttgaaaggagacttcacataaagctggaaaccctcttagagccaaaaattaatattgttttccaacagttttagtacttactgttcagctcctcggataaacaaactgaataaaattcagagttcaaaagaaaatataggaggctatctttatgacactgagaatagggaaaggtatattaaatgtgccttaaaatgtgcaaatartaaagaaaaagattcagatatttgagtatatcgaaatcacaggttttgttatacaaaatgtcctgtatataaatcacagactcagtaaagatatttgcattacaatgtccaaagtatatgaagaatttatacaactcaattagtaaagcataaacaagtcaacagaaaaataggcaaagagctgggcatggtggctcacacctgtaattgcagcactttggggggctgaggcaggcggatcacctgaggtcaggagtttgagaccagcctagtcaacatcgtgaaaccctgtctctactaaaaatacaaaaattagctgggtgtgttggtgtctgcctgtaatcccagctactcaagaggctgaggcacaagaatcgcttgaaccacctgaaggcagaggttcccgtgagctgagattgcattgctgcactccaggctgggcgatagagtgagactgtgtctctgtctcagaaaaaaaaaaaaaaaataggcaaagaatatgagcatcagaggacacctgaatagccaataaacatgaaaagaagctctacctcactaaaataaggcaaattgtaaagataattttcccctttactatttattagtaagtaagtagcggtataacactttcaaagcatgtgaccccccgttcccaaaactttttactgagtgtttttagcgttcattaatgatatttgcatgaatcacctttgaaatggtttttcttttcttttcttttctttttttttttttttttgagacagagtcttgcactattgccctggctgggtgcaatggcatgatctcagctggctgcaacctctgtctcccgggttcaagcgattctcctgcctcagtctcccgaataggtgagattacaggtgcccaccaccatgcctgactaattttttgtatttttagtagagacagggtttcactatgttggccaggctggtctcgaactcctgaccttgtgatctgcccacctcggccttccaaagtgctgggattacaggcttgagccaccgcgcccggcctgaaatggtttttctaattccatcattgcttctatatttattagttggcatttttctgtaaagaagacatttacctccccactttaaaaaaataccactatggaccaggcgtggtggctcacagacctgtaatccagcactttgggaagctgaggtgggtggatcagttgaggtcaggagttcgagatcagcctggccaacacggtgaaaccccgtttctactaaaaaaatacaaaaaaaaaaaaaaattagccgggcgtcatggcacatgcctgtaatcccagctacttgggaggctgaggcaggagaatcacttaaacccaggaactggaagttttggtgagccgagatcacgccactgcactccagcctgggtgacagagtgagactctgtctaaaaaaaaaaaaaattactatgaacttaggggtttcaattattattatttaatgtgttataatcctttacctttttttctttttaaacttagatctggctaatgaaagctcctttaaactggctcctttttaaaaaaacacatccttataattctctgagtgcttccttgctttctggcacacaatatataacaggttcacctaaatttttttgctccagacttggaattggccatttctttaaggagcacttactccctttactgtggagtgatatttagaaattaggatttttgttgttgttgttcctctgggctatcgttgcttctaggctcttttcaatatacagaatatattytcacacatatgtaaggatacatgcacaaakatctttactgcgtcattttttagaatgcaaaaaaatggaaacaaccaaaatgcccatcaatagaagaatggatatgtagattgtcatatcttataaaatgctatttagaagttaaagtgaatgagttatatttatatgtatcaacaggatgagatcttgaaaacacaaagttgctttaaaaacacatagcacacacagtatattctatatttatgagtacatatatatagtaaaacataaacacacattggaagaatacatatcaaatttataaaattggttacctctgggagagaagaatggatatggggaagaataaaaatgtgatagcaacttcagcaaaaatgtttttatttcttttattttataaaaagatcagaagtacaatattaatatttgtaaattttgaatggtggatatatagatttttgttatattcactatacatttctatatgtaaaatcccccagtctcacctctaacaaatgctatatgtaaaatcccccagtctcaccttataacagattatttataaatttaataagaaataatatattagagaaatttgtaatttataatgtctgctgtttcctagccttttttttttttaattcttatttttttaaaagacaggctctctgcctatcacccaggttggagtccagtggcatgattatagctcactgcagcttcaaagtcctggactcaggagattctcccatctcagcctgctgagtagctaggaccacaggcatgtgctaccatttctggctaattttttatgtttcatagagacagagtctcactacgtggctcaggctggtctcaaacttctggcctcaagcaatcctcccacctctgcctcccaaagcacagagattagaagcatgaaccgccaccactcttggccttctagtctttttgaggtaatatggtgtcaaagttatagagagtttaattttaatttttcaaagaactgatcagaaattataggaataaaattaatatttacatttttctgataatacaaaattaaaaatttaatgtgaagtttaattgcataaaaatacattattttatgtagaattgtattaaatttttaattatcttatttggaggtctagtacaatttttttctagaatattagaatgtaattccgtcaaatattgctaaaaattagattatttgtaagattttcttttaatttaaaaaagagttttctttgtttttttttttttttttttttggagatggagtctcactctgtcgccaggctggagtgcagtggcacaatcttggctcactgcaacctccacctcctaggttcaagcaatgctcctgcctcagcctcccaagtagctgagacaacaggcacacgccaccacgcctggctaattttttgtattttattaaagacggggtttcaccctgttgcccaggctggtctccagctcctgagctcaggcaatctgcccacctcagcctcccaaaatgctaggattacaggtatgagctactgtgcccagccaaggtttctttcaacaatgcttattatattatattctggtctacaataaagtcaatagaaatcctagctattttaaaaatatataaataaatctatgatttgtagctgttctttctctaaaatttcctatcaaactgtgtttacaagttcatttctaagctagatattaagaatttgaaataaatcttcctacatatgtgtatgtttattgttttcaaaagtttatctgaagaaaaatatatatttgtatacacaattttaaaaaatcacccataccaaattttactttcttgagttaggtatgtgtctttcatagtttagtgttgtcttatagattttccaatacttgtctttatacagacgcagtttgatgtaaattggaatcttagaatgtagggatcttttgttggttttggttagttttgctttgttggtatttgcttatttattgtatggccaacaagtgaagtgtgctttgattgactttaggtgggtgtgccctctcaccactctgtctataccctcccagcttcatgcagtttaagaaatgttcaatttgttggcaggtactaaggaaatttagtctactgattaacttatttttcttctgaacattgccagaatttcagcatttccaacgggaattttcctatgaatttgatttattttttatccatttacaaagccttttwaaggacatttccagcatctccatttttagaaaactttcaactttcaattaaactttcctagattaaccaaacttgccatttgacatcaaaaacttctttgactcaaaaatttttatcagttctaattggatggtttttaacagcttgtggatatttcagtatattattgaatattatatattcaagtatatatatactacatatatagtatataatatatatatcaagtgtatatatagaataaaaatacaaaaatacaaaatctttatatatagtatacaatatatatgtcaagtgtatatatagtatatattatatatatcaaatatacttgaatatatatagtatatatatagaatatatagtatatatatactataaacttgaatatatatagtatatagaatatatatagtttgtatatactatatatattcaagtatacttgatatatatacttgaatatataatagtcaataatatattcaagtatatatataaatatgttcaagtatatataaattcaagtatatatagtacatatatagtacatatagtatagtatatatagtacatatatactatatatacttgaatatatatatacttgaatatatattattcaagtatttgaataataccttaaatgaaactaatccacacaaatgtatgagtcacaattctttacccatgctagatgtatttacattttttaagaaattacagtatttattaacccaaatgaaactcaaattgaagtccaactcaagtgaaaagaaaaaattccaccaccacaaggaaagatacttttgcacagcccagttggctgtcccataagtaagcagtcttgccttggagtccatcaccagggtcactgcctaagatgtggtcagtccaatttccactgcttcttcctttcttctacatctgaatgtgtctgacttctaagtactattttggctttgaggtgttttgatttctctacagtggcttccattgagtgataatgtaggtcatctccaggcaggagaatggtatagataatattagtgtatgttatttctaagcaacgaaaggctgtttctgaataaagcaagctgagtggagtgttcaaatagggagcctccttctctctctggttttcattttgctgccttcatctaacaagtatctcttcctctagctctagctgtgggaaattggggcccttcccttaacctctttagggccttttcttttcctcttttgctcctttctccaataatcagcaacattatttatctagccatttgagtcactagattactagatggcgtctaagccccctttcatccattatatataaactataaagtatcctaagagaatcttggtgcataaatgattcataggtgagccaaaaaaaaaaaggactctaatttagtatgggtaatgagtcctgcttgtggttaggacatgtctgctttctggctgggtgcagtggctcacgcctgtaatcccagcactttgagaggccgaggcgggcggatcagctgaggtcgagagttcaagaccagcctgaccaatatggagaaaccccatctctactaaaaatacaaaattagccgggcgtggtgrcacatgcctgtaatcccagctactcaggaggctgaggcaggagaatcgcttgaacccgggaggcggaggttgtgctgagctgaaattgattgcatctttgcactccagcctgggcaacaacagcgaaactccatctcaaaaaataaataaataaaaatatgtagaatggttgcttgtctgctgcaaaagattgtatgtagttaggagagctctttagcattattatgaaattttaaaatatgccctcaggccagagcggtggctcttgcctgtaatccaagcactttgagaggctgagtctccattgagcccagatgtttgagacctgcctgggcaacatggctagaccttgtctcattaaaaaaaaataaaaataagaaaattagctgggcatggtggtacacacgtgtagtcccagccacttgggagtctgaggtgggaggattgcttgagctcaggaggatgattgcaccactgtactccagcctgggcaacagagtgagaccctgtctcaaaaacaaacaaaaacgaaacaaagttctcaaaattcaaaaagaaaacacgtttttaaattaaatgccaacattgtatgaaatgtttgctttgttgtggtaaaaagtgcaarttaaaaatgtctcgtatatacaaaaaataaactttttttcctgcatattgtccagttgaatacatggtaacagcaaaaagaaagttgaccacaggagctgtggcacttgtgaaatctaaatccctcttgtccaaaatctcttctttctgaatatggtaaagaactggtttcttggggcagcacatcttaaatgagaatatttatttaatatatattttaggaattcaaagcactttgtaattattatgtaattagtctgcataatagcctaattgataaggacatgagggcagcctcattgttacagatagagacatacaaatgtctatgtcgtagtgttgtaggaaaacccgggttcttgtcacacgaccaagataatttaggcatgcggatacattgtagggtgagaagggcagcatttattgtgtgaaaagraataaaagggaaacagggactctcagcaaaggtgagagtcctgctagcaggctttgcgcttcacagattgaatccccttttaccacccaggaacaggagagggcaggctcctccttcctgcaatgggtgctaactccccaaggctccaccacatcctcccaatgcacaggcaggttggagattctccagggagccctttttacttcactgtctcaatagcttacataacattatgttattattagacatttgtcttatttacttttatgacttttaatacactcaataataatgactaacatctattgagttgttatttcttgcagccactgtgctaagcccttaacattcaggatctttctttaaaaaaaaaacttacttaaataaagatgggatctcaccatgttgtccaggctggtcttgaactcctaggctcaagcagtcctcccacttcagcctcccaaagtgttgggattacaagcatgagctaccactccaggctcatgatcttatttaaccttcagagcaacatcatgaggaagatactattaacttgccccactaaatctgagaaaggttacataatctgcccgaggtcatacagccaataagtggcacagctggggcagaaagtgccaggcctttctgcttcaaggtctgttctcataactttgccaatccatactaggtgcattagagttagcatatcatgggccttcaataaatgtatgtggaatgaatacaacattgaaaaacttcaatttggtttagccaagtttctgggatgtgagccacatacaggacattcaaagatcattcattatataaacatctattaagattatatgaaatacaagtcaaaaccacaatgagattatcacatcacacccactaggatgactaaaataaaaaagacaagtattggcaatgatgtagagaaattagaagactcatatattgttgattggaatgtaaaatgatgcaaccattttgtaaaaccatctgggagttcctcaacatgttagacataaagtcaccatatgacccagcaatcgtacatccaagagaattgagaacacctgtccacacaaaaacttggacatggacattatggcagcatgattcatagtagccaaaaaaagttagaccaaaaaaagttataaattgatgaatgggtaaacaaagtgtggttaatctatatgttaccagaaaggggtctcgatccagacctcaagagaaggttattggatctcatgcaagaaggaatttggggtgagtctacaaagtaaagtgaaatgacatttattagagaagtaaagaaactaaagaatggctactctataggcagagcagtggcatgggctgcttgactgagtatgcttatggttattccttgattatatgtgaaacaaggggtagattagtcatgagttttccagggttgcaagttcctggaactgaaggttcctcccctttttagaccatatagggtaacttccagatgtttccatggcatttgtaaactcttttggtgctggtgggaatatcttttagcatgtgaatgcattataattagcatataatgagctgtgaggatgaccagaggtctctttcattaccatcttggttttggtgggtcttggctggcttctttattgcatgctgttatatcagtagggtctttgggacctgtgtgttgtgaaaccagtcctgccaagctcctgtctcatcctatgactaagaatgcctaacatccttgaaatgcagcccagcaggtcttggcctcattttaccctgcccctgttcaagatggagttgctctggttcaaatgcctctgacacatgcagtggaatattatttggccttaaaaaggatacatgcactgggcctggtggctcacgcctataatcccagcactttgggagactgaggcgggtgggtcacctgaggttgggagttcgaggccagcctgaccaacatggagaaaccccatctctactaaaaatacaaaattagctgggcctggtggcttgcgcctataatcccagctactcgggaggctgagacaggagaattgtctatacccgggaggcagaggttgcagtgagctgagattgtaccactgcactctagcctgggcaacagagtgagactctgtctcaaaaacaaacaaacaaaaaaaagatacatgctacaccatggatgaaccctgaaaatttgctaagtgaaagaagcaggacataaaggccacttcttgtatggctctttttattcagattagccagaataggcaaatccatagagacacaaaatagactagtacttgctaagagattcaaggagaggatgggcagtgactgctgtcaaagaacaaaatttagcctggacaacatggcaaaaccctgtttttataaaaaatacaaaaatcaggtgggcatggtggcacatgcctgtagtcccagctactcaggaggctgaggtgagaggatcacctgagcccagggcggtcgagtctgtagtgagccgtgatttctccactgcactccagcctgggtgacaaagtaagaccctgcctcaaaaaaaaaaaaaaaaaaattttaatgagttgacctttaaatatctgattgggttttttttgtttgaggagggttgtttttgtttttaagagacagactctcactctattgcccaggattgttcagtggagaggtcatagttcactgcagcctcgaaatcctggtccagtgatccccctgcctcagcctcccaagtagccaggactatcatcatgccaccatgccaggttaattttttattttttgtagagatgggggtctccttatgttgctcaggctggtctcaaattcctcagctcaagcagtcctcttgcctcaaccttacaaactgttgggattacaggcgttagccactgcacctggccctgatttgtttttattagcaagtcatgaattgggcagcatcctgtttatgaactagaatgatgcttcactaagctgagcagagcagagtgggtgagttttataggcagaaaaggagaaacaaggaacagaaaaggaagcagaaacaaggaaggaaaagcagattaatagtttcaaaattattttctttgtaggggtaaagcagagagaacttcctcatcatgctggttcaggttgactgggccccttttgattgccatgaatccctgggggctgtgtgtgtgtgtgtgtgtctgtgtgtgtgtgtgtgttgttttgttttgtttttctaaactggcctgtttttaagttcagtttgattaagtggcacctagcatgtgttactccatcctggtttggtctggtcttttgggtcctagtgtaggagctgagactaaaacaatggcttcacatacattttatttaacattgcctaatgagtatagggtttctttctgagggtaatgaaaatgttctacggccggatgcggtggctcacacctgtaatcccagcactttgggaggccgaggcaggcagatcaccaggtcaggatttcaagaccagcctggccaacatggtgaactcccatctctactaaaaatacaaaaaaattagctaggtgtggcggtgtgtgcctgtagtcccagctgctcgggaggctgaggcaggagaatggtgtaaacccrggaggyggaggytgcaktgagctgagatcgcgccactgyactccagcctgggcgacagagcaagactctgtctcaaagaaaaaaaaaagaaaatgttctacaattaaacaggggtgatggttgccaaagtctgaatatactaaaatcattgaattggacactataaaagggtgaattttatggtatatggattatatctcaataaagctgttttttgttttgtttttttcaagactgagtctcactctgttgctcagtctggagtgcagtagtatgatcttggctcactgcaacctccgcctcccaggttcaagtgattctcccgcctcagcctcccaagtagctgggattataggcgtgagccacgacacctggccaaagctgttttttttttaaaagactatatgctaaattttgagaatgcgaagataaggaaaatagctaactttcttttggggcttactctttagttaggaaaaaacagttgtaaacaaatcattttaatgcaatacgataaatatgaaaatagagacatgtaagccaggctctgggaacacaggacagaataaataactacctggagcatttgagaaagtttctgttaggaaatatctgagctggattttgaaggatraattcagaggcagtaggtccaatttcaggcagagggaacaccaaaagcatgcctaaaagcccagagatatgaacaaatattaattgttctgagaatgcaaaatctacacaaatatgtgagcttagggcacatgagaagtgagttaaaggagaggaagcctaaaactttagcagtaaccagttggagaggaactcacacttgccatgccaaaaagtgagacctgattctggaagtatgtagtgtcatgagatgtttttaagcagataaataacatgatcagatatctgtcttcaaaagatagtcctaatggtagtgtgaaaaacaaatggaagggtgaagagacagaagttcttggaggcagtgctacttgggaatggattacagtcatacaccacataataatgttttggtcaactacgatcacatatgcaatggaagtctcataaggttataatggagctgaaaagttcctatcacctggtgaggttgtagccatagtaacatggtagcacaatgtattaccctttctatgtttagatacacaaatgctcaccatgtgatacagttacctatagtattcagtactgtaactgctgtacaggtttatagtctaggagtaacaggctataccaggtagtctaggtgtatagtatgctataccatctaggtttgtgaagtacactctatgatgttggtacaactgcaaaatcacctaaagatacatttctcggagtgtgtctgtatctccgttgttaagcaaagcatagtatagtctcccatctagtttcagcctatggtgaagggatctctctctctctctccactccctgtccaggctttctccccctgatttttagagcctgagaacttggttgggtcacagttcaaggtaggtgagttactgttcccccaggaggcatgcctctcctttgctttctgcttccactgtgagcacagcaaacaagcctgcgttggcaggccytaccaccacctctgccgctagatctgtgctgacaagttaggaagtctacttttgaccttgggttctagctgggttcttcaatatagcttttaccagaattttactttggtactatcaggcacttacaggtctactaataaagccagttcctttttattcatgaggctattggtatgtataaagcccctttgtcaaggattcctagaggggatttgaggcactataaccaccctgaattcctaatagtggtagtgacaatagagaggcaaaaaatgccagacatttcagcagtagaatcaataaaatgagacctgagtggaatcctatctaatagcagcagtgcaaaaagagtagaagggattgaagcaggcacttaaggaaaacaccacagccaacagcatgcaggtagataaggagaggacaaattgaaacaacagaaagagatctaatttagtctaaaactggagatttccatgcagaggactttatagttaatttggatgagcagtgaagagccaaaagattgtggtggtagaagaggagctggcttcaggacagaggtgaagggttcactcaggacatcttgagtttgaggtgtctctgaacctcagctgttgtccaagagtcatttggagctcagccctagagcttaaagagaaataatggtacataggtacacactagacataagtggattaatttaaccccctgagttacattctaataatctatatgttatatgatattttgctataaattctcattgtccttattggaagagacagccattcccaaaggcatttgcatatactacttttgatgtcatgggatttttttctacaaaataatctttttaatcttttctttatattttttaacttttattttaggtttgggggcacatgggaaggtgacacataggtaaacatgtgtcacaggggtttgttgtacatattatttcatcacccaggtattaagcccagtacccaatagttatcttttttgctcttcttcctcatgcaacctcccctctcaagtagaccctagtatctgttgtttccttttttgtgttcataagttcttattatttagctcccattttgtattagtccatttatgctgctgataaagacatacctgagactgggaagaaaaagagggtttttttgtttgtttgtttcttttgtttttttgagacggaatcctgctctgtcgccaggctggagtgcagtggcacgatccaggctcaatgcagcctccgcctcmtgggttcaagcaattctcctgcctcagcctcccgagtagctgggactacaggcacacaccaccacacccagctaatttttgtatttttagtagagacgaggtttcaccatgttggccaggctggcctcaaactcctgaccttgtgatccacccacctcagcctcccaaagtgctgggattacaggtgtgagccaccatgcccagcggaaaaagaggtttaattggaatcacagttccacatggctgagaaggcctcagaatcatggcaggaggagaaaggcacttcttacatgttggcggcaagagaaaatgagaaggaagcaaaagaggaaacccctgataaaaccatcgggtctcatgagacttattcactatcacaagaatagcgcaggaaagactggcccccataattcaattacctacccttgtgtccctcccacaacacatgggaattctgggagatacaattcaagttgagatttgggtggggacacagccaaactatatcattccgcccctggcccctccaaatctcatgtccttacatttcaaaaccaattatgctttcccaaaagtcccccaacatcttaactcatttcagcattaacccagaagtccacagtccaaagtctcatctgagacaaggcaagtcccttctgcctatgagcctataaaatcaaaagcaagctagttacttcctagatacaatgggggtacaggttaaatacagctattccaaatggaagaaattggccaaaacaaaggggatacagggcccatgcaagtctgaaatcgagtgaggcagtcaaattttaaagctccaaaatgatctccttcaactccaggtcttacatccaggtaacactgatgcaaaaggtaggttcccatggtcttgggcagtactgcccctgtggcattgtagggtacagcctccctcacggctgctttcacaggctggcattgagtgtctatggcttttccaggagcatggtacaggctgtcagtggatctaccattctggggtctggaggacaggtggccctcttttcacagctccactaggcagtgccctagtagggactctrtgtgaggactccaaccccacatttcccttctgcactgccctagcagaggctctccatgagggccccaaccctgcagcaaacttgcctaggcatccagtcatttccatacatctcctgaaatccaggcggaggttcccaaacttcaattcttgacttctgtgcacccacaggctcaacaccacatggaagctgccaaggcttggggcttccaccctctgaagccacagcccaagctgtacgtcggcccctttcagccatggctggagcagctgrgatgcagggaaccaagtccctaggctgaacgcagcacagggaccctggacctggcccacaaaaccactttttcctcctgggcctcctggcctgtgacgggagggcctaccatgaaggtctgtgacatggcctagagacattttccccatggtcttggggattaacattaggctccttgctacttatgcaaatttctgcagctggcttgaatttctcccgagaagttttcttttctgtcacatagtcaggctgcaaattttccaaacttctatgctctgcttcccttataaaactgaatgcctttaacagcacccaagtcacctcttaaatgctttgctccttagaaatttcttctgtcagataccctaaatcatctctctcaagttcaaagttccacaaatctctagggtaggggcaaaatgcctccagtctctgctgaaacataacaagagtcacttttgctccagttcccagcaaattcctcatccccatctgagaccacctcagcctggattttattgtccctattgctatcagcattttgggcacagccattcaacaagtatctaggaagttctaaactttcccacattttcctgtctttttctaagcccttcaaactgttccagtctctgcctgttacycagttccaaagtcgcttccacattttcaggtatcttgtcagcaacgccccactctactggtaccagtttactgtattagtccattttcatgctgcagataaaggcatacttgagactgggtagaaaaagagatttaatttgacttaaagttccacatggctggggaggcctcagaatcarcagcaggcagygaaagacactttctttatatggcagcggcaagagaaaatgagaaggaagcaaaagcggaaacccgtgataaacccatcagatctcatgagacttacttgctatcactagactagcgcaggaaaaactggcccccatgattcaattaccttcccctgggtccctcccacaacatgtgggaattctgtgagatacaattcaagttgagatttgggtggggacacagccaaaccatatcacacttataagtgagaacgtggtatttggttttctgttcttgcattagtttgctaaggataatagcctccagctccatccatgttcccacaaaagacgttatatcattcttttttatggctaaatggtattcaatggcatataagtaccactttttcttcagttaacctgtcattgacatgcatttctgttgattccatgtctttgctattgcaaatagtgctacagtgaacattcctgtgcatgtgcctttatggtagaatgatttctattcctctgggcatatgcccagtaatgggattgctggttcgaatggtagttctgcttttagccctttgaagaactgccatactgctttccacaatagttgaactaatttacactcccaccaacagtgtatgtgttcccttttctctgcaaccttgcccacatctgttatttttttcactttttaatagccattctgactggtgtgagatcgtatctcactgtggttttgatttgcatttctctagtgatcagtaatattgaacttttcttcatatacttgttggccgcatatatgtcttcttttgagaagtgtctgttcatttcctttgcctacttttttttgttgttgttgttgttgagacagagtcttgctttctcacccaggctggaatgtgatggtgcaatcttggctcactgcagccttcgcctcccaggttcaagcaagttgcatgcctcaacctcctgagtagctggtactacaggtgcacgccaccatgctcagctaatttttgtagtttttgtaaggatagggtttcacaattttggccaggctagtctcaaactactgacctcaggtgatccacccatctcggcttcccatagtgctgagattatagccatgagccaacatgccaggcccttcgcccactttttaatggaattttttgtttttctcttgtaaatttgtttaagtttcttatagatgctggatattagacctttgtcagatgcatagtttgcaaatactttattcctttctgtaggttgtctgtttaccctgttgatagtttattttgctgtgcagaagctcttaagtttaattagatcccacttgtcaactgttgcttttgttaagactgcytttggtgttgtcatgagaactttgctcattcgtttgtccagaatggtattgcctatgttgtctcccagggcttttatacttttgggcctggaggctctgtacagggagttgccgagcagctactggctcaatagctctggtggcggatggctagagccccakgcttggaggacctacccaatgagcagatatgggaatgggcacccatgtaacagtctggccagttttctgtagggctactaaagtagctgagggcccctccagtccctagtcacctcagattttccagtacctagaggtatcaccagtgaagtctgtgaaacagcaaagatggcagcctatcccaccctctaggagcttcatcccagggaggtacaggcctgttgctggtccaaaggcacctgaaggaggtagctggtgatctggttgggaggttctgtccagtgaggaggaatgggatcggggactcacttaaaaaaagcagtctggccacrttttggtagatcagctgtgctgtgctgggggatcccttccaccctccacactccctttcgcttggactctccaragctggaagactggaacagctaaggtgcccaaacagcaaacatggtgactagcccctcccctcaggacctcctttcctagggaggtgcaatgacacttctggtagctgattggaattttagaggtgccatggaagtgagttgccgtggaaatggggcctgcaggctgttgctgcttatccacctgcattcagcctctttcctagggatatgtacaggagtctaacctcccacttcatgcgacactgcacctggctaagaccatgtctctaaaaaaaaataataataagtaataacgttttcttttttactactttgggttttaaaaaaaatcaaaatgtgttttattttgtgtgttttgttttgttttctctctatctgcagagaaacactagtagttgtgcctaagagtggatattgtcagtattttattcagctgtatgggaatgaacattttggaaaatctgaaaaaaaaaccagtcatttctttcttagaataatttaaatctattttttcagttagatgattaaaaccctacttgtgtcactctgtctcctttgaaaacagactcttgttggcttgtttacaaatgctcacgagggctctttagttccagttccaatcatcaatcctctgtggttcaagagaccagcatgatgtcccaatcacccatttgtaaaataggtttattaatatttttaggaacaggagccaaatgacacgaggcagtaatggttcctaccagagctgccctttgatcaaagtctattaaacttgacatcagtgcttttgttggtagcctgtgcttccctggaatggcaccaagctttgaagtgctttattttttatgagttttactagatttttttcccctctccttcagttctaataactggcttttaatcctatcatcatagccaggggatttgtctgtaaagaccagtagtttgctatggtgaaaaacagggcaaaaagattaggactctgaacttttcagataaaaacatgcattttgccatcttaagcattttgcagtttgtattcccagcacttctcaccaaaagcagtatttttcttttgtttttcaaaaacaatattgaacaaaagacaggaacataataactgagtttcagctgtataactgaagagaggaatatgttcttctatcttccactttccttatgacatgggcgtgttgttataattatatttttctcataagctttgtgataaaaattactataggcttagatcactcttccttctttaaggagcagggagtcattgttgttgatgaatctaacatttttggaaaatatgcatttttttgggaagcattctgtttgcaattatttcttactatgtttttcccaaatgctttaatcagtgaatctactaacagctgtagcaatgttgccagctctactaaaagagaacactttatgaaaaattaacaaaaaaagacaacagaaaagtcattagaagcatatttttatttgatatctgtatctacaaattagtatcttgtttaaggtcaccttcttcttttataaaccagacatgttcccaatacctgcttgagtctccatgagttgatggtgatatgtctctgtctcaaaacatcaaggatggccaggcactgtggctcacacctgtaatcccagcactttgggaggctgaggcaggagaatggcttgaacctgggaggcggaagttgcggtgagccgagatcacaccattgcactccagcctgggcaacagagtgagattctgtctcaaaaaacaaaacaaaaaatcattttcagtaaaccaggagaccctctttgtttccatccagcaggtataattatctttagaatatatcaaagagattttctcacttgtttttctattagtcatagctgctaaatgtcaaagagacctcaaccaacttcctgctgattgcccagaggctacaatcagaaagcacagttgatgacatggatcaggtttctcactgattacctcataggaaatccttactccttttaggccttccagcttatggcagccctatggccaggnnnnnnnnnnnnnnnnnnnnnnnnnnnnnnnnnnnnnnnnnnnnnnnnnnnnnnnnnnnnnnnnnnnnnnnnnnnnnnnnnnnnnnnnnnnnnnnnnnnnnnnnnnnnnnnnnnnnnnnnnnnnnnnnnnnnnnnnnnnnnnnnnnnnnnnnnnnnnnnnnnnnnnnnnnnnnnnnnnnnnnnnnnnnnnnnnnnnnnnnnnnnnnnnnnnnnnnnnnnnnnnnnnnnnnnnnnnnnnnnnnnnnnnnnnnnnnnnnnnnnnnnnnnnnnnnnnnnnnnnnnnnnnnnnnnnnnnnnnnnnnnnnnnnnnnnnnnnnnnnnnnnnnnnnnnnnnnnnnnnnnnnnnnnnnnnnnnnnnnnnnnnnnnnnnnnnnnnnnnnnnnnnnnnnnnnnnnnnnnnnnnnnnnnnnnnnnnnnnnnnnnnnnnnnnnnnnnnnnnnnnnnnnnnnnnnnnnnnnnnnnnnnnnnnnnnnnnnnnnnnnnnnnnnnnnnnnnnnnnnnnnnnnnnnnnnnnnnnnnnnnntaacttgtaaggtttacttcctgtgacagcattcatcattgttcagtttagccatcataacattagccatagtcattgctaatcttgctctctccttttgctaatattgtattcttaagagtaccttttggttcacaatattattaaaatgatttcctttctatcctttcccttgttttctggattttatgtactaaagcctcaattttattacccaagtggaatgttctgttttagaacatcacctatrctgattactcccatgccactgttcataaactaccataatggcagaagtaagcatcagtttctcattactgtcagtcactgctaaccttacctctcaacctgccttcagcatataatgagaattctcaaatgctattttcccaaaataagtcattgcttaaatagtaaaataagttatttttaaaatagcttaattaaatagcttaattaagaagatcaactgtaaagctggtatttgaaggccctgagaattctttttttgtggggaggtttctttagttgttttgtttgtttatttatttatttatttatttatttatttttgagatggagtatgctctgtcacccaggctggagtgcaatggtgcgaactcagctcactgcaacctccacttcctgggttcaagtgattctcgtgcgtcagcctcccgagtagctgggattacaggcacccaccaccacgcacgactaatttttttgtattttcagtagagacagggtttcaccgtgttggccaggctggtttcgaactcctgacctcaagtgatctgcccgccttggcctcccaaagtgctgagattacaggcgtgagccccaatgcctagctaatttttgtgtttttagtagagatggggttttgatatgttgtccagggtggtttgatctgtttggccagatcaagtgatctgcctgccttggactcccaaagtactgggattacaggcatgagccaccacgttcagccttctttgttgttctgttttgttgttgggaagattccttttgttttaacaaatgttgcaaattttttttttttttttttggtggggaaatggagacataagtcattaaataaacagattctttaaaatatagaataggacaaaagattcaagtattatttaaacattattcagtgtagatgatagtggactattatatattttatatatatagctatgctgacatcagtttgttttatttgctcttcttaaaaaaaaaaaaatttaaggccgggcatggtggctcatgcttttaattccagcactttgggaggctaaggcagaaggatcgcttgagcccaggagttcaagaccagcccaggcaacacagggagacccttgtctaaacagtaacaacaaaaattaaccagacatggcagcatgcacctgtagtcccagctactcaggaggctgaggcaagagcatctcttgagcccagaaggctaaggctgcagtgagctgtgatcacaccattgcactccagccttggtgacaaagaaagamcctgcttcagaaagaaaaaaaaagtttttttaagtacaggaagagaggtggttgagggtatggttaaggcattaaattgaaaacaagcagattaagaaagattccttaattaatggtaatttttttaaattattattttttttagaaggagtctcactctcttgcccaggctggagtgcagtggcacgatcttggctcactgcaacctctgcctgccgggttccctgcctcagcctcctgagtagctgggattacaggcgccaacgctacgcacggctaatttttgtatttttagtagagacggggtttcaccatcttggccagactgatcttgaaatcctgacctcatgatccactcaccttggcctcccaaagtgctgggattacaggcgtgagccaccgcgcccagcctctttagcacctttctctgatcagctccgtggtagctaacattgtgtcatctgtggagaaattgactagaccaagcaaaaacttgtggagactgaaggagatcataaaagagtctgtgatgaccctacagtgaagtctcccatgtggaactcctgatagcattttagcatcttattaaatatcagtggataacagaaggccacctctcatgtgaaaaacagaaaccaaaacaaacatgtaagccaagaatgagatacaaaagaaacagagacaatgtaatgagctgaagaaaatgtaaaaacagaacaaaaaactaccatcagtagacacagataagtaaaaacagtgtgctcatgaaacatgaataagaaaaaggaaaaatcagagaacacaacaagctcttagagcttaaaactgtaataccagaaattaataattaaataaggaaagaaaggaggataatgaagaaattacccagaagtagaacaaagatataggaaaagtgaagaaaattaaataatctgttcagaagcttttttcctaataggagatctagaaagataagatagaggaagaaaaaaataatttaagaaaacttcccaggacggaaggacacaagttgatctgattgaaagtacctaccgaaagccaggtgcagtggtgtgcctgtaggtcccagctacttagtaggctgagcaggaggattgcttgtgccctaggagtttgagccccccctgggtaacactgagaccccatctctttaaaaaaaaaaaaagaaagaaagtacctactgagtgtctactataatgaatggaaaaccgaaacacacactaaagccattaccctcctgattttttgctttgagttttcttctggatatcttttactcattcagccattaattttgttcccttgttttctgtcctttttaccttttcttactttattgaactacctctatgtggcatgacatccacttttatgattttatccacctgcatgtccatgattgttctctgatacctaaatccaattgtctctctctytttttttttggagacagagtctcactctgtcacccaggctggagttcagaggcaaaagttggctcgctacaacctctgcttcctgagttcaagcgattctcgtgcctcagcctcccaagaagctggaattacaggcgtgcgcaccatgcccagctactttttgtattttttgtagagctggggtttgaccacgttggctaggctggtctggaactcctgacctcaagtgattcgcccacctcaccttcccaaagttctgggattacaggcgtgagccaccatgcctggcctcagttgtctctcttatgaactccaaacctgcttcctggaatcctctactccagtaccactagttctcatacatttctaaaagtgaacttgtttccttagctcttcttttttggtcttctaatgtacctatttatctttctgtattttctattgcagtaactgaaaatatcatccctaccatgttacaagtcaaaaatctaggagtctgaagattactctaggcccctgcatcttcctcacccctcatgttcagtcagcatgtcccatcagatcttctygctgctagccccatgtgtcctaagttcccaggaaaccctcccattccccattcatccctcaaggaagggacgatcaagtgtcattagacatttgaagagaaaatctatagcatgaaaaagataaacaaaagtaaactaatacacaaattgatcctgaagataattttaaaaaaactcttaagtagtagtttcagatttgagattatattgcccataaaaataaaatgagaatacggtaaaaaaaaaaaaaaaagaacagagaataacaaggaacttttagatgttaaaaatatgactgccaaactaaaatgattctatagaagggttgaaagataagtagaggaaaactaagagtttacagggtaaaaagacaaaaagaaggaaaatattacagtaaaaggtaagacataaatgtgtaagtctaacattctactaataggaatgccagaaaaagagaaaattaagaggaaggaactatcaaagaataatagaaattttcgagagctaaagataatagtattcaaaattaataaggtatcttaagtcctgagcagaatttttaaaggcatataaatatagactatatagaggtaaatcactgtgaaattttaaaacaccaaaaataaaagttcctgaaaagccctaaaagaaagcaaaaatgtgcagcctaccaaggaacaacattttcagcaacaacagatattggaagaaacagaacaatgcctttaaggatttgagaggtcaggcatggtggctcacgcctgtaattccaccactttggggggccaagacaggtgaattacttgaactcaacagttcaagaccagcctgggcaayatgttgaaactcaatctctgcaaaaaaatacaaaaattagccaggcatggtggcatgctcctgcagtcccagctacttgggaagctgaggtgggaggatcacttgaatccaggaggtcaagactccaatgagctgtgattgcaccactacactccaacctgggtgacagaggaagaccctgtctcaaaaaggaaggattcaaggagaatcgtatgcccagcaaaactactgaataaagatgaggacaaaatcaactcatttctagacaggcaaggacagaaagtttacctctatcagaaaaacagtatggtttaactagaaatagctgatagaatttgtgcatgtttgctgaacatttgctagtattttcaaaattctgcaagctctctttgctgttttattgtgcagaatagaatattttctttaaatgtttaattctatttgtttctttgttaccattttgtttttaagagacagggtcttgccatgttgcccagactggtgtgggactcctggactcaagcaatcctccttcctcagcctcctaaagtagctaggactacaggcgcacgccaccatgcctggctaatttttctgttttttgtagagacaggatcttgctatgttgcctaggctggtctagaactccttgcatcaaacaatcctcctgtcttggcttcccaatgtactggactacaggcatgagccactgtactcagcctgttacctttttttaaaaaacaccaaacttcatcagtctattaatctctctgctttcctccaccctttttttttttttgacatggagtcttgctccattgcccaggctggagtgcagtggtgtggtcttggatcatgcaacctccacctccyaggtttgagcggttcttctgcctcagtctcccaagtagctgggactacaggtgcatgccaccacgcccagctaatttttgtattagtagagacacggtttcatcatattggccaggctggtctcaaactcctgacctcgtgatccacccgcctcagcttcccaaagtgctgggattacaagcatgagccaccatgcctggccckctctttctttaatttccctcacgcattgttttaaaaatcgtgtcttgtggttaatgatttcattctctatatttatctgaattctgtatatttcacaactaattagataactttttgtagtatttgagaacgtataaattagcagccatgcaaaataagagttctacattattgggagtagtggagcaggggagagagctttttccctatgataacatgttttaattttacaaatatgggaacagcctaaattttccttccttattttttcgcttcctttttttttttgattttttatactgtggtaaataaaatttgtcattttaaccatttttaagtgtacagttagtgtcattacattcacagtgtgttgtgcacccaccaccagtatttccaaaaattttccattaccccagagagtctataattatgtagcaatcactctccatttccccttcccctccagcctctggtaaccactaatctttctgtttttatgaattttataattctttcttatatagtaccactaagaagtacagataatattcattatgtaaaatatcatttacaatatatggtattttgctatcattatctacagggtctgtcttagttatctattactgcataacaaattgctccaaaacttagtgtcttaagacaacaatagccttgtattatttcttatagtttctatgggtgcagtattcaaccagggtacaacaggaatgacatgtctcctccatgatgactgtggcccttgatggaagacacccatgccaggggctgaaaacttctctgaaggcttgttcactcacatgtctggcaattggtgctgtctgtcacctgggagcttttctggggctgtcaactggaacaccgcaggatttctccatgtggcctgggtttcctcataccartggtggctaggttcccaaggcaagtgtcccaagagagaaagaaagggagagacagagggccagccaagttgaagccatattaccttcaatgacctagcctyagaagtcacacagcattggccaggcacggtggctcacgcctgtaatcccatcgctttgtgggggccggggcgggtggatcacctcaggtcaggagttcaagacccacctgggcaaccaggtgaaaccccatctctactaaaaatacaaaaattagctgggcgtgatagtgaacacctgtaatcccagctactttcgggaggcggaggttgcagtgagccaagattgcgccattgtactccagcctgggagacaagagtgaaactctgcctcaaaaaaaaaaaaaaaaagtcacacagcattactttaactgcattctgttgggtgagacagttacaaaggtctactcacgttcaaggaagaagaacatagatcccacctctcaatggaggcatgtcagtgtcacattgtatgaagagcatgtgaaatgacataagaattggtgtgaccatcattgaaaatatattcagccacactgtgtttctaacatagttcccaactccacctctgaaactaaatcctttaatttgccctaactgtagctaattaaccatggagataggtatcctacttactctaattaggaaactgagattcacacattgaaaagatgaaaaacatgcaatgatgtagctgttcttaaacaaaagaaataacatttcttgaaaacaaggttattattaaaatgtgtctactaaagaagctgtcctaattaacaggtttttttgttttttgttttttgtttttagttannnnnnnnnnnnnnnnnnnntggtgagacagggcatccctgtcttgtgccagttttcaaagggaatgcttccagtttttgtccattcagtatgatattggttgtgggtttgtcatagatagctcttattattttgagataaatcccatcaatacctaatttattgagagtgtttagcatgaagggttgttgaattttgtcaaaggccttttctgcatctattgagataatcatgtggtttttgtctttggttctgtttatatgcyggattacgtttattgattttcgtatgttgaaccagccttgcttcccagggatgaagcccacttgatcatggtggataagctttttgatgtgctgctggattcggtttgccagtattttattgaggatttttgcakcaatgttcatcagggatattggtctaaaattctctttttttgttgtgtctctgccaggctttggtatcaggatgatgctggcctcataaagtgagttagggaggattccctctttttctattgattggaatagtttcagaaggaatggtaccagctcttccttgtacctctcgtagaatttggctgtgaatccatctggtcctggactttttttggttggtaagctattaattattgcctcaatttcagagcctgttattggtctattcagagattcaacttcttcctggttcagtcttgggagggtgtatgtgttgaggaatttatccatttcttctagattttctagtttatttgcatagaggtgtttatagtattctctgatggtagtttgtatttctgtgggatcggtggtgatatcccctttatcattttttattgcgtctatttgattcttctcttttcttctttattagtcctgctagcggtctatcaattttgttgatcttttcaaaaaaccagctcctggattcattgaatttttgaagggttttttgtgtctctatttccttcagttctactctgatcttagttatttcttgccttctgctggcttttgaatgtgtttgctcttgcttctctagttcttttaattgtgatgttagggtgtcaattttagatctttcctgctttctcttgtgggcatttagtggtataaatttccctctacacactgctttgaatgtatcccagagattctggtatgttgtgtcttcgttctcattgattccaaagaacatctttatttctgcgttcatttcattatgtacccagtagtcattaggagcaggttgttcagtttccatgtagttatgcggttttgagtgagtttcttaatcctgagttctagtttgattgcactgtggtctgagagacagtttgttataatttctgttcttttacatttgctgaggagtgctttacttccaactatgtggtcaattttggaataggtgtggtgctgaaaacaatgtatattctgttgatttggggtggagagttctatagatgtctgttaggtctgcttggtgcagagctgggttcagttcctggatatccttgttaactttctgtctcgtagatctgtctagtgttgacagtggggtgttaaagtctctgattattattgtgtgggagactaagtctctttgtaggtctctaaggacttgctttatgaatctgagtgttcctgtattgggtgcgtatatatttaggatagttagctcttcttgttgaattgatccctttaccattatgtaatggccttctttgtctcttttgatctttgttggtttaaagtctgttttatccgagactargattgcaacgcctgcctttttttgttttccatttgcttggtagatcttcctccatccctttattttgagcctatgcgtgtctctgcacatgagatgggtttcctgaatacagcacactgatgggtcttgactctttatccaatttgccagtctgtgtcttttaattggagcatttagcccatttacatttaaggttattactgttwtgtgtgaatttgatcctgtcattatgatgttagctggttattttgctcgttagttgatgcagtttcttcctagcctcgatggtctttacaatttggcatgtttttgcagtggcttgtactggttgttcctttccatgtttagtgcttccttcaggagctcttttagggcaggtctggtggtgacaaaatctctcagcatttgcttgtctgtaaaggattttatttctccttcacttatgaagcttagtttggctggatatgaaattctaggttgaaaattcttttctttgagaatgttgaatattggcccccactgtcttctggcttgtagagtttctgccaagagatccgctgttagtctgatgggcttccctttgtgggtaacccgagctttctctctggctgcccttaacattttttccttcatttcaactttggtgaatctgacgattgtatgtcttggagttgctcttctcgaggagtatctttgtggcgttctctgtatttcctgaatttgaatgttggcctgccttgccagattggggaagttctcccggataatatcctgcagagtgttttccaacttggttccattctccccatcagtttcaggtacaccaatcagatgtagatttgatcttttcacatggtcccatatttcttggaggctttgttcatttctttttattcttttttctctaaatttctctgctcgcttcatttcattcatttgatcttccatcactgatagtctttcttccagttgatcaaatcggctactgaggcttgtgcattcatcacatagctctcgtgccatggttttcagctccatcaggtcctttaaggacttctctgcatcgggtattctagttagccattcgtctaattttttttcaaggtttttaacttctttgccattggctgaaacttcctcctttagctcggaatagtttgattgtcggaagccttcttctctcaccttgtcaaagtcattctccatccagctttgttccgttgctggtgaggagctcgttcctttggaggaggagaggcaccctgatttttagagtttccagtttttctgctctgttttttccccatctttgtgattttatctacctttggtctttgatgatggtgatgtatagatggggttttggtgtggatgtcctttctgtttgttagttttccttctaacagtcaggaccctcagctgcaggtctgttggagtttgctggaggtccactccagaccctgtttgcctgggtatcagaagcagaggctgtagaacagcggatattggtgaacagcaaatgttgctgcctgatcattcctctggaggttttgtctcagaggagtacctggccatgtgaggtgtcagtctgcccctactgggggctgcctcccagttaggctactcggggttcagggacccacttaaggaggcagtctgtccattctcagatctccagctgcrtgctgggagaaccactactctcttcaaagctgtcagacagggacatttaagtctgcagaggtttctgctgccttttgtttggctgtgccctgcccccagaggtggatggagtctacagaggcaggcaggcctccttgagctgtggtgggctccacccagttcgagcttccaggcactttgtttacctactcaagcctcagcaatggcaggcgcccctcccccagcctcactgcagccttgcagtttgatttcagactgctgtgctagcaatgagcaaggctccatgggtgtaggaccctctgagccaggcgcgggatataatctcctggtgtggcatttgctaagaccgttggaaaagcgcagtattagggkgggagtgacccgattttccaggtgccatctgtcacctctttctttgactaggaaagggaattccctgaccccttgcgcttcccgggtgagtcgatgcctcgccctgcttcagctaatgctcagtgcgctgcacccactgtcctgcacccactgtctgacactccccagtgagatgaacctggtacctcagttggaaatgcagaaatcacccatcttcagtcatgctggaagctgtagactggagctgttcctattcggccatcttggctccatcccccgtttttttgtgtgtgttttttttttgacagggtctcactcctttgcctcagctgaagtgcagtggcacaatcacagctcactgtagcctcaacctccgaggctccagcagtcttcccacctcagctccccgagtagctgggactacaggtgcacaccaccactcctggctaatttttgttttggggtttgttttttgtttttttgtgtttttttgtagtgacggggtttcaccgtgttgcccaagctagtcttgaactcctgggctcaggcagtcctgccatatcagcctcccaaagtgctrggattatcggcatgagccaccgcacccagcctaattaacagcttcctggtcaagaaaacattttcatatgaataacattatgtgtgagcattgtgtttatattttaggtgtgaaagcatttttttaggtccttgattgacctgaaatatttgaatacacagttgcctttttttccgtgacatatatttagggtaatgtattaagtatatttttgttatataactgctctaaccaagttatcttacctctctaaagctgcagtttcttccgaaatgttataataatactagtattgacttcatagagctgatgtgaggattaaatgagttaatatatgttaaatgcttggcacacaataagtgctgagaaaaaagttagacacaggaagtacatggatatgttttacatatatatatttatatatgtatatatgaagagtcagagcataatgaattcatttccaaaaggtatttaaaggataaggcaatatggttaattaaaatattttgttaagctcttttatgtaagaagaacatattagattgcttcttactttgataactactgtttgcttttcctagttcgaaaaagaaaaacagcatgatattcgatcattttttgtaccacaacctaaaaaaagacagttgatgacctcctgtgacraatcaaagagattccrggaggaaaatactgtagtgtcatcagaccctacaaaaacagctgcaagagatatcatcgattatgaaagtgatgttgaacctgaaacgaaaagattgaaattggctgcctcggaagaccactgcagtccgtcggaagagacaccatcccagtccaagcaaayccgaactccactcrtggaaagtgtacaggaggccaaggcccagttaaccacyccagcctttcctgtagagggctggcaatgtagtctctgcacctatatcaataattcagwgttaccttattgtgaaatgtgtgagactcctcaaggcagtgctggtgagtatatagaaggtgaccatggaggtaagggctgttagtggtgtcttcagataacctgtgcttttagagactgctgttatccagggttagtgtgactcagcacaactttagcttttaaattggaataagagcttcttatagtgaagactgaatttatcccttatggaatgtgaaaagctctcagttctgtcaagaatgtatatccccaaacgtctgtgatatggcattaatttggcacaaatggacatttctgattaatgtcagcaggatatgaattcagtgagcaggaatagaagctctgttgctatggtagcaaatatgccttatactcatagaccttctattttctctcctctgtagctaatacttgtttttaaggaaattgtggattatttttatgtttaaatggcaaaataatctaatgtagcttctttgcctagtcagtatacattgtgccatggtttttgcttgtcaaagcatcaaaactcctctatggatcaatcttcatttgtgaaccaatttgatgtctggtttttttgagtttattcttttttaaaacatattattttaaagtcagaaatcataaatatacctcaagtatgtttttatagcatgggataccattttctgatgtttagtttctgaaatgattattaatacccgtggttgtcgtaagaaaaagatcatgcgtattcttgtttccaattctatagagcatttttatagtaataaaaatgccaagttgacagttttggaaactggaagtacacattgtattttatcagttgtaataattgtacacatctaattttgcatcatacattaactcttcaaaatattggcggccgggcgcggtggctcacgcctgtaatcccagcactttgggaggccgaggcgggcggatcacgaggtcaggagatcgagaccatcctggctaacacggtgaaaccccgtctctactaaaaatacaaaaaattagccgggcgtggtagcgggcgcctgtagtcccagctactcgggaggctgaggcaggagaatggcgtgaacccgggaggcggagcttgcagtgagccgagatcgcgccactgcactccaggctgggcaacagagcgagactccgtctcaaaaaaaaaaaaaaaaaaatattggcattgacaaagactcagctaagatataaattctgatattgcagttccttcctcttgccttgctcttctctctgtcttaattttgatttgaaggaaaatgtagggaggagctgagtcttccctctttcacttctgggtactcccaccaaaattgacaagtctgccctctgagtggttatatttgtatgtgggcacctgttgtctgtgaactaaattggaatcacatgcttattccatgtaatatctctgtcacaattagcatgattgcatgcaattcccaactgctacaggcaatraaaataagctctattgtgactataaaataatgttagttcacattaaatgtataagttgaatgatttagcaacaaaagtcataatttaatatgggttttatagttctgatttttcctttgcaataccaagagcaacaatgaaaatttctagacccatgattcaataaggaatctgtcaagcaacttaaaaaaataaaaactaccttttgtgaataagaaagtctgattagagagaaatacatagtctaagtaacagtgatattactatatataaaaaatataattattagatttatatttctaccactgccacatctgatacccaaatcttctcctccctgttctttactacatcatgctaaaaacttgggctgtatctttggtctctttctcgcctcccacactcaacccatcaagtaacctccaaataaatcttgattccaaccactttatctttattgctaccatcctactctaaagccaccatctttctcccagacctcaatagcctccatattaatctgatccttcagtgcacagcagccaaagtgatcctttatttctttgcctaaaactctttaatggcttccagttacatttagaatatttagaccaagaatataggcccgagtccaagcttcctagagccatgaacagctctcagctcaaatgggactcctctcagagcttggtcytcatgacttttgctatagtagtgctctccaaaaccttcttactgaaaaaaaaaaaaaaacaaaacttagttgtgttctctttatctgaaaatatactatttacctatttgttaattttattgtctttctctgccatttagaatggagtctagaatgcagggatttctctgtcctgttcctgctgtctcttcagcatctagaatagtactgggtatatagtatgctcctgataaatgttttgaacatatgaataaacattattcactttctttttataagacctaactgttacattctttttactttacttttaaatgtaaattattacatttttgtaataatttttattttaatagttatgcaaatagatagcctcaaccatatccaggataaaaacgagaaggatgattctcagaaagacacctccaaaaaggttcaaactatctcagactgtgaaaaacaagcccttgcacagtcagaacctggccagttggctgacagcaaggaagaaacaccaaaaattgagaaagaagacggacttacatcccagccaggtaatggtaagtcttgtttccatttctagcatccaagtaataacyatatactttcacacataatactgttattagattagtaattactaccttgttccaggttccttttactctcttttatattaaaaataccaaccatttgtaaccacatacttaaacaccagatgtctagaagagctgagtgtgtctgttggcattcagacattacacatagagcaaaaccgataaatagctacatgtgctgccaccaggcctgttgcccagcctcaaccaagcctagctcattcacacagtaagggtgttgttttgatatttgggaggtgctttgggacaaaacagtaagactgacagataattaactaacacttagcatatcattaatcctttacacaaaaattcttgtaaatagttatacttaattggcatatttttaaaaaagtattttaaagaaaatgtttttagggaacataatgtcaagactgtatgaatcatgactgcatttgtagccaaccatacagtgttttgggtttgtttactttttggttgattccattcattatttatagctgtgatggttagcaaatactagcctgtatgtcatatttcactatcgtttatgggctagctggcaagagactgagtacttttgggttattttccttgttaytcatttagtgaccatagtaacatacagattgatattcttattcagataaacccaatagttgggatgagactgttgaagcttttcttctaagttagttgctattaaacactaatataatttagagtctgactcatagctttaaaatgaaatgttcatttaagaatttctgagctcaaggcatccttctttcttcttctctcagccttccttctaactcctcaaggtcttcccaaagcatgtcttggaatggatctgtttagatctgttaattttaacagcttttaagtagacagtgtagactcaggtgggttatactcttttgtgtctctagttttcttgatctcactgtgagaaactctcaagtgctgatgaaactctggtaatgggacagcatatggctcagtgaactaaatatgagactaggaaccaacacctggcaattgtcatcacctgggctatgagtctcttcatctatggcagggaagtattggcttgttagttgtacattgatctcttgataaaaacatgttagcttgtacttacaaatgttttttaaaaatcactttgaagttttgttctgccagtgaaatttgctttgccctcattcactccagacaatgccagcatttaccccttacctagtcgtgcttccstcttttgacttttcagatcactgggctgagaattccacataagaggtatgcttcacatctttccactaacatggatttccatgaaaaacaaacagaaaacaaagtaggcacactatgttaaatgcttattctacctacatatgctcttttagaaccagagtggtacatactactctagaactgtagttttgttctctctggaattccaggagtttggaagaatgaccatagatgcatcatctatagtctcaaaccattaatttacacttcatggcaacactgaaaagagaaatatgttccctaatatagctgatagctatcaagaattaatatcaactgatttggaattgttgttacagttatttttatcaaagaatggcttctgatctttaagcattaatgcatagttcttcaaagaaaactgccaattaagctatgacacaataccttaatgatagcccaggccaggccacatcatcctctgttgcttggacatttctttcatttattctgagggatttggcaatttctcctgctttcagttgctttctttggcatgtaataggcaacccttttgaacatctcagtaaccaatgtaagacactttcctctatttgcagagctcttgcttccttcagtaccatgaagcactccattattcctttacaagaaaataagatattttggttattcctccagtgatacacatttgcttctttaataccaagtttatgctttcctggtctgtatccaagttttatggtatacatgataacttttcatttcaataccaaatcatagtgaaaaaatttaaagacattttaaaggtaataaagtaaatacatatagtagcaacaatgcatatacctcatgtgtagtgtaaaagtgacaatagtattacagctatgactcagctcatccatactaaggcaaagacaactattttacaactgccacatggccagcaatgattgtaaaatgccattgttgttattggctgtaagacatgccagtttcagagatgttaaagtgcgtttttgaatttacaaaataagggaataattcataaatcaagtttgtaaagtgggcaatgccttgattagaaaaataatagtatgatgacattgccaagtagaatggcaaacaaatcatagacttctaggtctgggaaagtactttaaaagatcactgaggaactgtgagagaaggtaagagcacagactctggagccagcttgcaggttttacatcctcttactagccatatgaccataagtaagttaacgtgcctcagtttcttcctatgtaaaatgcactatttatttctaaaaggtgttactgtatgtacctacaacagtgcctggcacattgtatgtgctcactaaatgttaactataattgttatttagacctgcgttgataatcctgtatctcctgcaaaatatattggacagtaggactgagaaagggctaaaaaagaagagattatcagaaaagaagcttgtctgcttatcttcttttgtgaatgtcaggcaccaggctacagggaatcaggcatttaagtggccctcaacatagcgatgttgctgctaataatcaaaatgatgctcattcggtctcaaatctactctagcaaaaggaatagattagtctaaattttttcaagaccaatagcagctcttattggwggaaattcttccttatgcctaccaacttgtattttttcagctaattctgaatctgtttgtttcttgttagatcattagcaaaaatgtaaaacaattggttaccatataagccaatatgctcttcaatggcctaccgtggtagttttatttcaagcctagacaattactttttgttaaatatattgatattttgatatagctatttcatcgttctaacctacacacgattaaaataagctattttagatagagggtagataagccttcaggttctcttttgtcttctttaatagaacagtggaagagttcagacactttgccagtgtatgacaccttaatgttctgtgcaagtaggaatactgaccggattcacatctatactaaggtaagcgtcatgcagattctgtaacttgaaacataaaaaagacttccttttttcacttttcagtggagatacttaattttattaacattgagataagcatctagttattttcctcaaagctaattctcaaatttctgtgttaaatctacagacaatgagaggtaaaaccacacgtctttaagaacatagacttcagggctagactgcttcagttcaaatctgttagtatgtaatcttggacacattactcaactgctcagtgcatcaatttcctcaactgtaaaatgtggtataccccatttaccctgatgtgattattacacattgtatgccagtatcaaaatatctcatgtatcccataaatatataaacctactgtgtacccttaaaaattaaaaattgttaaaataataaaaaataaaatgcagacaggatttgttayaaagataaaacaagctgagtcctgtaaagcacttagcacagtgcctggcctatatgaactctccataaatgttaattcctgcaatgatcacttgcagcagcaggagcagcagcatccttacagaagcctagacctgcccatttgtgttgagtaaatgttaggaagctttttgtcagatgattgctgattcctgccataggctagcttagtagtgcccaaactttttagattcagtacccctttgcactcctaaaatttattgagaaccccaaagagcttttgtttgtatgggttatatctattgatgtctactatatttgaaattaaaatggagcctctcagaaatactcatttatggctgggtgtggtggctcatgcctgtaatcccagcacttggagaggccaaggtgggtggatcacctgaggtcaggagtttgagagcagcctggccaacgtggtgaaaccccccacctctactaaaaatatgaaaattagctgggtgtggtagcaagtgcctttaatcgtagctactcaggaggctgaggcaggagaatcgcttgaacctgggaggcagaggttgcagtgagccaagatcgcgccactgcactccagcctgggtgacaaaatgagactctgtctcaaaaaaaaaaaaatgtttttttcatttattcacttaaatgtgaataattaacaattacatttttctatttctgttttgtattttttgttttttttaggacagtctcgctccrttgcccaggctagagtgcagtggtgcaatctcggctcactgcaacctctgcctcctgggttcaaacgattctcctgcctcagcctccaggtagctgggactacaggtgcccaccaccatgcctggctaatttttgtatttttagtagagatgatgtttcaccatattggccaagcttgtctcgacctcttgaccttgtgatccacccacctcagcctcccgaagtgcggggattacaggtgtgagccacccacctggccgttttttgtttgtttgtttgtttttggagagagagggtcttgctgtgttgcccagactggtctcaaactcctgggttcaaacagtccgcccgcctcagcctcctaaagtgctaggattataggcgtgagccactatgcctggccaacaattatttttaagtgagtaaatgcatattttaagagaaacaaacccattatatatatataaaaataacattttttatttaaaataattatattttccaagtcaaaaaaatatttagtgagaagaatgtcattgttttaaatgtttagcaattttctctaaagtcttaatggaaaacagtgggattcccatatccrtctctgcgttcagtttgttgagatagcatttcatgtagccactggaaaaagtcaccatacatttgtgaaagaatgagagtggaaaaggcaaacagtatcttactattagtatgaaaacacttatgactttctgaaaggatcacaggaaccatgtgagaatctatggcctggatagattatgaatacttttatttggtctaaaattttaaatttctttttttttttttttgagactgagtctagctctgtcacccaggctggagtgcagtggtgcgatctcggttcactgcaacctctgcctcccaggttcaagtgattctcctgcctcagcctcccgaatagctgggattgcagcacccaccaccacacctagctaatttttctatttttagtagagacagggttccactgtgttgtctagcctggtcttgaactcctgacttcgtgatctgcctgcctcagcctcccaaagtgctgggattacaaacgtgagccaccacgcccagcctaaaattttaaatttctaatctttataagtatataagatagtatttgaaacttttaaaactcatggtccattatatcgatgtttaaaagataatatgttggagatgaccaaactttcagttacaggttttctactaaaccgaatatagatatagatagatagtgtaccatgtaataatattcttttaggaggagatggctaggattttgaataccagaatccccaagcagcctctagcatggacaataactgagagagagacaccaagaaccaagccaggcagtaatcaatgctcctcttataggtttggagcctggtctaccaagtggagcctctgacatggtgaaccaggctgcagggagcaccaatgactcctttattcatcttgaggcaggtttaagtgcctgagccaccctcatgccccatgttgggggatctttaggccatgcctctttctcagaccatcacatgagagggacagagaaatggtcccaagagggtagagaaaccaaaggacagacaccaggcagagcataccacagaaatccagaagcccttaaattctttaatctttttttactctatacaatgaaagctctgcctcttggattacctgatcaatgttttatccccgttggggtggagacggagagaactgcaagctcctggtagagggtataatgcacctgctgccaaaccaaaccacagcgaccacctcactgacccgtattcaggctctgccaccagcctagtagcctgcttcttcttgacatctctgttaatggtctcaaatatatttttatgactgttctaaatacttacatgtccctttaccataaaatgttatcacccaaataattttccaaacacaagacactaagcagatgagttgttgacatatcttttcacaaccagagtagagctgagatgaaagctttccttttcaccttaaaagagctgaagtaaggctgggcacagtggctcacacctgtaatcccaacactctgggaggccgaggcaggcggatcacctgaggtcaggaattcgtgaccagcctggccaatatggtgaaaccccgactctactaaaaatacaaaaattatctgggcatggtggcaggcaccagtaatcccagctacttgggaggctgaggcaggagaatcgcttgaacccgggaggtacaggttgcagtgagccaagatcgtgccactgcactccagcctgggcaaaagagtgtgactctgtctcaaaaaaaaaaaaaaaataaattcctagttcactgcctaaaaggatatccctttaaaggaagagtagtaacagacatttagcatcctgtgtcatattagaactgttcatttcagctagaatcccaagtctatatcagggtttagaattacatatcaattttttnnnnnnnnnnnnnnnnnnnnnnnnnnnnnnnnnnnnnnnnnnnnnnnnnnnnnnnnnnnnnnnnnnnnnnnnnnnnnnnnnnnnnnnnnnnnnnnnnnnnnnnnnnnnnnnnnnnnnnnnnnnnnnnnnnnnnnnnnnnnnnnnnnnnnnnnnnnnnnnnnnnnnnnnnnnnnnnnnnnnnnnnnnnnnnnnnnnnnnnnnnnnnnnnnnnnnnnnnnnnnnnnnnnnnnnnnnnnnnnnnnnnnnnnnnngtgcctggcctcaaaatttttaatcagtgcctactttttgtatgtttttctccaaagcaattgtgggagctgtaacttttttttttttttggctgagagaatatgagttcaactattgttgatataatagattttcgtatgagatgttcttcttcccctttataaaggaaatagctctactacaccgctgtatgtggttactttctacccttaagatttcaggggctgggcgtggtggctcatgcctataatcctagcactttgggaggcggaggcgggagaatcacttgagcccaggagttcaaggtggtaggatcacttgagcccaggattttgagaccagcctgggcaacatgttgaaaacctgtctctacaaaaaatataaaaaattagccaggcgtggtggaacgtgcctgtaattccagctacttgggaggctgagatgggaggatcacctgggcccaggacgttgaggctgcagtgagctgagatcatgctgccgcaccccagcctgggtgacagagtgataccttgtctcaaaaaaaaagggaaaaaaaagatttcaggatgttgtgcaccgattgatgggacctaaatgcagttccacttactctccaggtggtaccattggcagacagtcctcattgactgatactgtgacattgctttgggggagccaatttttaagtaatttctctagaattgatctttctaccttctctttacttccttgttcctgtaacaatggacaggcatatcatttggtgaagattattaagactattccttgataccattctttgatgtgatacttgtattgtcagtgagtataaagaagtttatttgcaaatttggaatggttgtgctactgttaacttcaaggatgtaatattcttctatattaatttgcagtgtacaaattttattgttttgatacatctttccaagattagtcaatagaaaagagtatgacacagcagtaaacaaaggattccaggctgaaggcaatagccttgggctaggcatgggcaatggaggcatccagtgcggtagagagcctgcctcctcttcttggctcacagtttctccagaggagccattttggtggacccttgtctagaatgtgtcacctcagtttttcttttaggagactaggcatattgtgtcataatgtaattattttcatttaaaatagttactagtgcctatacaaaaatggattattagtgtcttcctaatctatcatcaggatggaaarcagatgagctgtaatttcattcctctggatataaaattagacctttgggaagatttaccagcaagctttcagctgaaacaatatcgctcactggtaagaatagttttaaataaaatggctttatttactttaaataaacttgttttagtaattttaatgatcatttttagtttaattttaaaaaagcactttgtggcatgttgtagagtcaaatcactggttgcattttcatcattctaggyggtgcctattaattacccagtgctaagaatatatgtgaaatctgtttccttggcaaatgatcacacctacagttgctgtttctgtggatagaatcatcctcacattatttaatttctcattcacactattagcaactgtgatatttgtatctgctagaatcacattttttctattaaggttaagttctaacaatgacaaattcccagagcagagataataccttattgggtgattcttgattcattatcagaagcactagcatgcagcttcaggccaagttcctgccagggaggtcttaacactgatctgtggctgattttccttcactgccaagaagggtcatcatgcgcagggactaacctagcatgctgtgtgctatttttacaagaaaatggtgatttttttttttttaccatttgagtggaaatgaagcattgcccgtaggtcaactatacctgttttaaatgaaaagggagcagtaagctatttacttggaatcatctaaccctgattctcagagtcccagaaaatagccagttgtgtatacttgactggtaaccctactaaaaatgtcccagatttattgatgttttttttcctgtgaaaacgtaggcatcatttacgaagcaattctcagatgttgcactatcattctgtcacccagttttgccttgaccccagctagggtatgtacttccagaccttttttggtctcaatgagcatattatcactgttgatctatgtgtgttaagggcatacactgcatgtcctgaaacatgcctttagagaatctttggcttgaaaaagatctcttggctgggtgagatggctcacacctgtaatgccaacactttgggggctgaggcaggaggatcactttggcccaggagtttaagacgagcctgggcaacatagtgagaccctgtcactacagaaaatagaaaaactagccaggtatggtggcatgtgcctgtagtcccagctactcaggagactaaggcagcaggaggactgctggagcccaggaggtcaaggctgcagtaagccgtgatcatgccactgcactccagcctggacaacagagcaagaccctatcaaaaagaaaaaaaagagatatctcttgagaactgctgtaggtagtttacaataaagatatgaaaactgcatcaaattgaagaaagccttaggttatggaactcaaaagcctatttgggggacataacaaaatagcagttttctgatgttgtaaataggctcacattcaaaggaagatatctgcctgtgagctgttaactcttattatctcattttctgccagattttgagatttgttcgagaatggagtagtctaactgccatgaagcaaaggataatcaggaaaagtggacagctattctgtagcccaattcttgctttggaagagatcacaaagcaacaaaccaaacaaaattgcaccaaaaggtatgagttgtctttttttaaattttgtattatattacttttcatggttctttctacaggggggtctgaggcatcttttggaaccactaatgaaatcctgatgagttatgagaaaattatgcataaaatcacagccatattgtttcataacaagataattatatgtctagtgaatttgacaaaatctgctaaaagagatcaggttgtccagatcttactctccatgagtcccatcaatcaacaaaaagaccagagtcacaggatggtgcaacctatgacctgccaagcctgggacacttattagcagcaggaatacattttactcttagaacatcagagcatgcctctggaccccatctgctttgccctgctgtgcgtgagtatgatgctgtgcagcaagggagctggttctatttgaatgcatcaccacccaagtaatggaagataactataatcatgtccatgattggaaatgaaataaaaggaaaggttgaccgtcagatatttgtgactgttttgtccttatcattacaggttcctttctaatctctgtacattgatttccttccttgtcatcacaatcatctttatcccactcaagtctccccatgtgtgatctcaaatccctgttctttgtaaactcttttcttagcatgaagcaaggattatcaggaaaagtgatcagctgttttgtagcccaatccttgcttttgaaagagattgcaggctgcgcgcggtggctcatgcctgtaatcccaacactttgggaggccaaggcgggtagattgcatgagcccaggagttcaatgatcagcctgggaaacacagggagaccctgtttctataaaaaaaaaaaaaaaaaattagccaggtggcacactcctatagttctagctacttgggaggctgaggccggaggatcgcttcagcctgggaggttgaggctgcagtgaactgagattgtaccactgtgctccagcctgggcaacagagtaagaccctgtctgaaacaaaacaaaacaaaacagatggcaaagcaataaaccaaatggcagcattggcagagaaagccctttagctcttgctgcctccatacacctgtaatctctcttcatccttatatttcatcagtttatcagagaggtttcctttctctagctttttccatgcacacaggtgaaaaaaatccagggggttggaggggagcaagggaccgagaacatggttgattaaataaattatgatagttccatacagcgaaaatcttttccactgtttcaacatatggcatatggtacatttatttgtttgtaagaacaaggaataatacttgtgataaattgttaagggtaaatataaattgtaaaaaaaaaaaaagggatggagacacaaacttcactatttgcacaacttgctattactgacatagaaattgtctagaaggataccttagaaattcttatcacgggtttctcttggacagtggttttcaatttggagcaatttggtcccgtaggatggtagtgtctggagacattttaaattgtctcaagtaagggatgtgactagggggtatctagtgggtagaggcccaggatgctgctgagaatcctacagtgaacaggattgcaccccccaaaacagaattatccatttcaaaatgtctgtattaccactgttgagaaatcttgctctagggcataaaacttgaggatttctggaggtagtagggactttacactttatgccaggattacaaactcatttgactaaaaacaaaacaagaatcacaaatgaatgaatgaggtcagttataaaactaaaaaaggatgagatatgggctgagactatgtcaaactggcagatttggaacccatctgaagtcattcaaattcagatttaaaaataaaatactggtacatggtggctcacgcctgtaattccagaactttgggaggccaaggaggacagactgcttgagcccagagctgaagaccagcctgggcaacatggcaaaacctcatctctacaaaaaacagataaattagccaggcatggtggtgcctgtagtcccagctactttggagactgaggtgggaggatcacctgagcccctggaggtcgaggctgcagtgacccatgattgtgccactgcagttcagcctgggagacagagtgagaccttgtctcagaaataaaataaaataaaacaaaacaaaaattaaattaataaaataaaaaaatactggctagccatggtggctcacacctgtaatcctagcactttggaaagccaaggtggaaagatcacttgaggtcaagagcttgagacgagactggtcaacatagcgagactgtatctccacaaaaccccaaaaaaatagccaggtatggtggctcacgcccacaggcccaaatattcgggaggctgaggcaggaggatcacctgagcccaggaggtcaaggctgcgataagctgtgatcgtgccactgcactccagcctgggtgatcaagcaagaccctgtctcaaaatgaataaataaatgtaaaatgttgtatgagtacagtaaattaatgctgtatgagtacagtaaagtcctttgactaattgaatttatccataagttgccagtttgggactcttagcctgaactcttctgtaacagttgatttttttcccatgggcgtgtgtcattttctataaaaatacatttaaaatatatgtgttacatatttatatacatatatacacatacttacacataagtgcacacacgcacacatatatcaaaaagcacaatgcctattttatttttcccaaaacttccagtcctctcaatctttctcatttttgtaaccagtctttgttgaccttctctttctcacatgatcataattcttttcataactgaatttctagctatttctggacatgtcctaytatttcttctccatcggacatggatgaccacttaaagtaccaactgagaaaggtgactgatcagatttaaaagcaaaagtcaattcataaaaccaaagtcagacacaatattatttataaaattatatatacataatatattaaggatataacttgtgttaacaagcagcagattaatcagatttgtatttttaagagctagctctagcagcagttgggagattagatcaaaaagggcaagactcaaagtggggagataagttacatttttctatcgctgccataacaaattaccacaaatttagcagcttaaaacaacacacatttattatctcacagttctataagtaagaagtccaagttggctattactagttttctagtaatgctctggattttacaaggcagaaatcaaagtgttggctggctgggctctagttgataagcttggaaaggaattcacctccaagctcactaacattgttggcagaactcagttccttgcagttgtaggactgaggttcctgttttttgctggctgtcggctggaccatcagctcctagaggcctctctgtggtcctagcacatggaccactacatctttctccttggaatctctctgccttcgtcttctgcttttaagggctcaagtgattacattgggcccactcagtaatctccctatcttaaagtgagctgattagtaatctaattatatctgtaaagtccttttatagcattatctaaattagtgattgattaaataacggagggacaggaatcctagagggtatcttaaaattctgcctactacacaagttaaaagactattctagtatacctggagaaaaacgatgaggatctgtattaagttattacaatgggaatcaggaaagagaatgaagagagctcttaaggaggtatatctagagacttggtgactgattatagagaggcagagagagagaggcctccagggaaaccaacttagcagcatcatgaaatgaaacctctgtacctgcagcagggagatactatcgggaagcattctgattcttgctgcagaacccaagttaagtctcagtaatttggaataaccatgtatctctgaaagcaaatgtgaaatatgctgttgaacaacagcattgactggcagtctgtataaggatcagttagacactgtcctatcaatttactttctagagaaactgaatcagagagtctccagacttagaaacatcaggctcagtagagataaagagtgaggtattatattgaaaactgaaactcctcggacccccttttttgcacagctttcagattgacagcagcgacattttacttcctaagcaggacgttagaggatttctctcttaaaagtactgaatggttctgaaaaaagacctatagttaactgactttgggcactcccccagaaacattgataaaggtctccaaccagattatccgccagtgatgtccaacagtttgcaggccccatccaagctcagagcttgcagtcagcttttgaatgtctcacttttacatttgaatggtagccaagattaccagccactgttttggttactgagtcccatttatcagaggcaggcctaattcacttggagccctgtcatgtttaggatgccaattgtttaatctctggttacagctgagctcaaaagcaggtcagaaatccagagcccaagattgtgttcattgatgtgggccactttgcaacgtacacttttcttgcaaaaattgccatcttccactcccgtccctatccaggaatttgtttagtagacaacattctcccttctctatttactaaaattgggatttaccataatccttttgggagttggtgaacttcctagcaaacctcagtagaaaattaagtatcggcaacttgcaactacgtttgaaaagttgtcagctccgttttttggaatttgttcgtctgtttcttgtggtttccaaaaatttattcttaaacctcttgtaggaaagcaaaaggttatttttagtttctaaatctctgactagatttctcagcatcttttagttactgaattaggtttttaagcttttaaacattgaataatacctcaggcaaggcttaatatcccattgcccctcaaagctaggaagcttttgagttcatttagaattcacagaaatactttcccaaagtgcatttttcaagggaataaaatggttgaaraaattgttggaggtggggccagagaaggaggaaatttgggaactaaaagggcaagtaaaagaactctaaaacaatttactgtgctttaactacgactactgcccagactggagcacgatggcttaatttcctttttgctctaagaaagacatgcaagtagagtgcaaacatgtgaaaagatattcccccttactcttaataggaatgcaaattttaaaatctatgatgagatgcctatcactattagcagagactcttaaaaatgacattgtgctagtgaaagagaagaaacagatactcttattcattgctggtggatacatacactggtataaccttagaggaaagaaatttgtcaaaatctacccacatttaaaacacctaagacctttgaccaaggaattctacttctggggatttattctatagatacataatgtgtagaaaacatcatatataacgatatctattacagcattgtttgtgatagcaaagaatgaaaacaacctaaatgtccatttatgagagactggttaaatatatggtttatccatataatggaataacatggagccattaaaaagaatagggaaactatgataataaggaaagatctctgagaagcatgttttggtaaaaagagcaaggtgaagattagtgtatatgctatgctattatttatttctaaaaataaaaggtataatgaaaaatgagtgctagtgggtacgggtttctttttgttttgkttttgtttgagacagggtctcaatctgttgctcaggttgcagtgcagtggcgggatctcagctcactgcaacctctgcctcccggattcaagtgattctcctgcccctgcctcccaggtagctgggactgcaggtgcgcaccaccacgcccagctaatttttatatttttagtagagacagggtttcaccatgttggccagtctggtctcgaacttctgacctcaaatgatccacccgccttggcctctcaaagtgccgggattacatgcatgagccaccgcacccagcctcaggtttctttttggagtgatgaaaatattctggaattagtgatgatggttgtacagccttgtgaatatactgttaatgcacttaattgtaaactttaaattggtgaattttatgctctgtgaatgatatgtcaatggaaatgcaaaagtaagtaaataaaaggcatacacctatactcagaaaaaaataagctatttcttattttatttttctttctttcttttttttgagacagagtctctctctgtcacccaggctggagtgcagtggcgcaatctcagttcactgcaccctccatcttcctggttcaagcggttctcctgcctcagcctcctgagtagctgagattacagacacacaccactatgcccagataatttttgtacttttagtagagacagggtttcaccatgtgaatgtgtgacaagatattcccccttactcttaataggaatgcgaattttaaaatctatgatgagatacctatcactattagcagactaatatgttgctcgaggctggtctcgaactcctgacctcaggagacccacccatcttggcctcccaaagtgctgggattacagatatgagccaccatgccaggccaaaaataaactatttctaaaatgagccagacacggtggctcacacctgtaattccagcacttggggaggctgagacaggcggatcaattgaggccagttcgagaccagcctggccaacatggcaaattcccatctctactaaaaatacaataattggccaagcatggtggtgcgtgctcgtaatcccagctacgggaggctgaggcatgagaatagcttgaaycagaaggcggaggttgcaatgagctgagatagtgtcattgcactccagcctgggcaacagagtgagaccctgtctcaaaaaataaaataaaataaaataaaataaaatgaattaatcagcatttctgcaaagatgaattagcatgtctctgagagatagggaaatacactatttctctaatgatatccagggttcctaaaagatcttttggtctaattggygagggacgtattgtacacatcccagggatgtcagtcagactccagttactgctgtctcagtgtgatggcttccagaagacatgcaataaaatgactcaagatcattttgagtcaaaataaaataaaaacaaaactgccaacagaggtaacttttggggaggggaaaaaggaagatgggagtgagagagaaaatttctcatcaccataaacatgcttgtttgccttttgaatttagaaccatgtgcttatatcacctaatcaaaaattaataaaatagtttattaaaaaaggaaacctgtttattattaaatctatcctaataacataaagcaaatttctaaaattttacctacgattgcacaattccattgtgattgaactttaattttattgtcaagctgcctaattaagaagcactcaataatattaagaaattcatgtttaaactaatttccaaaaaaatctacaataggtgtaaaccaccagagaaactaggccaattaataagaaggaattaatcaggtaattgcattttaccaacttaaattcccccatcacctttaatgggaataacttctctttacttctagtccctgaacattgtgtggtattgttagtgttgggtaataaggttctgaatcccatatcaagagtggctttatttctgtggaagaatccataaaccctgtatgggctgataataaggggaacaaccttgagattacagaagatgtgattgaacctggttaactaaaaagaaactcagtttacccaaacactgatacactattataactgactaaggtgatttggagaagccttgaagggaaggccaagagggaggtaaaatacagttagagattttctgcacagcttgccaagcagtttccttaaggctgtcagttgtgcgtgtatttgatcatttcttattctcacaccgactcctttttcccctaaatgaaaattgctccaaaggatattgaatgactcttgaatttcttagaaaaagaaatttgagaaaactaatttggaacaaagagatgtatttctcacataatggacaccaagataaagggtaaaaattccattttctaacttgagtttcagcmcagttaatagaattgtgcttgctttttcttctattgcttttgcaaggaacaatgtaaacatgcaatagagacatttttatatgagatagagggaatctatttaacatatcattgttttagatacataaccaaagaagatgttgccgtagcctcaatggacaaagtgaagaatgttgggggccatgtccgtctgatcacaaaggagtccaggccacgggatcctttcacaaagtaaggtttttctactactagtatatagtagtactaattccactcctttacatttatgtattgattttcataataatatctcacctttgcatgaccactttagaggttacaaagaactttcacaagatagtagctcttcagttgtcctagcaacctgttgaggtacctggtgtcctcattttaaacattagagatgaagaaggacactgagaccaggtggactaagtaacctgccccagggcttgcgggtagaggccaggagacctgaggttaaatctgggctctgtccccgaatcttgagctccataattagaagtctttcttttaactcttctaacaaacaaccatggaaaacagacaaagcagctgttgttacttcccaagtaggactttctaacaaaattgagtagtgtaccttttcttttattctaacaaattgagcacatatcctatcatgttttgtatcctatcatgtttaatttcatccactctgcgtttacctataagagcaagtcttctgttctaattcctatcagcactgtcagctatttcactctgtcactttatggctgtgactctatttcctgtgagctagcagaggctggaggagagagtttgtaattacctctctgagctaatgaggtgtgtgaccacatatatttaaggagcagggtagccactaagctttggttggggttttacattagcctgtcctttcccagcctgaagaagcattttctaacagcttctccagatgtttcacatgtttccagatcgtttaacacaagggcatccccttgtgttaattcccaagagaggcaacatatttatattcaattaatttttgtaacacaccattcttctttacttggcatggaatatagagtgctgactgtaactattttatttctacactgtgatctgtgtttactatttatccgtattgaaactttgataacctttatatgaagcaattactatttagcctaatcattcattagttacctattcagtgtttttatcaattgtagaaaacttcttgaagatggagcctgtgtcccrtttctaaatccatacacagtccaggcagatctcactgtgaagccctctacatccaaaggctatttgcaagctgtggataatgaaggaaatccactttgccttcgctgtcagcaacccacttgccagactaagcaagcatgtaaagcgaactcttgggattcacggttttgctctctgaaatgtcaggaagagttttggattcgatctaataacagttacctgagagccaaagtatttgaaactgaacatggtgtgtgtcagctctgtaatgtgaacgcacaagaactctttttacgtctgagagatgcccctaaaagtcagaggaagaatcttctgtatgctacctggacttcaaagctcccattagaacaggyaagttataatcatgtgatagatagaaggcagcattgtactgagtaatgaatattgactctctattttgtacattttaacatgggaatattcagatatataaaaggaaagaaaataatggacccatatgtccatcagccagctttaacagtttacagcattttggcattcattttcatctgtcattgactcacttgtttgtttctcctagaatattttatttatttatttatttatttattatttatttatttatttatttattttggagacagagtttcgcccttgtcacccaggctggagtgcagtggcgcaatctcaactcactgcaacctctgccacctgggttcaagcgatactcatgcctcagcctcctgggtagctggaattacaggcatgtgccaccacacctggctaatttttgtattttcagtagagacgggatttcaccatattggccaggctggttttgaacccctgacctcaggtgatccacccgcctcagcctcccaaagtgctgggattacaggcatgagccatcatgcccggccatctcctagattattttaaagaaaattccaaacgtttcttttcactcttgaatattttcattctgtatctctcacaggtaaagacctccttccttccttctatccttcttttcctctccctcccctgttcccccctccctcttcccctttctctctctctcccttccttcctcccttccttccttttctcctttcctccttccctctttgcttgtcctcatttcctttcctctctttcttttaaatataatcccagtatgagttatcacacccaacacaattacaattccttaattatactaagtctatgtttggtttcccaggttgtctcaaaaatgccttttgctgggctcagtggctcacacctgtaatcccaacactttgggaggccaaggcaggtgtatcacctgaggtcaggagttcgagaccagcctggccaatatggagaaaccccatctctactaaaagtataaaaaattagccaggcgtggtggcaagcacctgtaatcccaactactcgggagctgaggcagaagaatcgcttgaacctgagaagcagaggttgcagtgagccaagatcatgccactgcactccagcttgggcaacagagcaagactctgtctccaaaaaaaaaaaaaagtattttatagttactttgttcaaattagaatcaaaatgtcacccacatagtatatttgattataatgcctcttatgcttcatttaatctattatagcaccccattccttttttatactatcatactatcaatggttgaatatactggatcatttgccattctggatttgtcttcctgtatctgcaaggtattgtttgacatgttcttctgttcccccaattttctcagtaagaattgtaagatctagaggcttagtttcattctcattcagttattttgggaaaagatcttaacaggtggtgcagtatatcaagaggcacctatggtctggcgattcccctttccatgttaatattgaaagacaagaggcaaacagataacccagaaatgtagtccatcacaatcagaggctatgtatgtgtatatacactcacacacatatatgtgttcattgcattgaaaaatgtaattttaatacaacaaattatgacaaattattatttatagmacactatcatcaatattcactttcatttccaaaattcaactggatttctaatcttgctatctgaacaattctaaatttcaaactaggccaggcgttggctcatacctgtaatcccagtacttggagaggccaaggcgggaggattgcttgagccaagagttaccagcctgagcaatataktggaaccccatttctacaaaagaaaaaaaccagaacaattagccgggtatggtagcatgcacctgtagtcccagctagtggaaccccatttctacaaaagaaaaaaaacctgaaaaattagccaggtgtggtagcatgcacctgtagtcccagctacttggttggctgagataggaggattgcttgagtccagaaggtcaaggctgcagtgagctgtgatggtgccactgcactccagcctgggcaacagagcgagaccstatctctaaataaaatgtaattttgtaatgtgcttaatttaaaaagaatcacccctcagccactgtgtgcccactaaaatattggatgaattcctgccagtttgacaaattatatatttttatttacctaggacagtgttgctgaattatgaragaatgaattaatcggcatttctgcaaagatgaattagcatgtctctgagagatagggaaatacactatttctctaatgatatccagagttcctgaaagatcttttggtctcattggcgagggacatattgtacacatcccagggatgtcagtcagactccagttactgctgtttcagcatgatggcttccagaagacatgcaacaaaatgactcaaggtcattgaaagcaacctgtccaggaatgcagaagtaatataatagacatctaaaacaaaagtgctctgagaataaggaacacaataggctcgaattgggtaggactagagagtgattttatatgtatatataatgtatatatataagtatatataatatatatatawatatataatataaatatatatttataataatatataataaaacatataatatatattattgtatatatttttatattttatatatatatatrtatatrtatatattttttttttttgagattgggtctgggatctcactgtgtttcccaggatgatcttgaactcctggctcctgggccaagtgatcctcctgcctcagcctcccaaacatctgggattacaggcatgcactaccacatcaagtgattccttcaagaggtgggcaaatttaggatattgaagagtggcctcaagtgatttgccttacaattgcttggaaaaactaaagaagcatcttctgaattattgagtctgtcagagtgggggctgctcagagagaaggaattggtttaaaaaggcaaaaccaaaatggatttttttttccctaagactatgccatttgcttgatgcacaagaccgccatttgtagtagcttctaacaatgccaacctcaaaaacaaaaatcaatacatttcttctaacagaagttgggaagttcagcacagaagagaaggtaaggcaggcagtaacaaaggtcagctggacaaagtttactgctccaacttgttgcctcttgtgactcctcatgggccagcactattgatcaggtcattgtgcctgacaggcttgcttaaacaggctttatacataatcatgggttcccatggccagcagccgtgaagttgaaggaaataaaagcaagtgccatactcatctttgtgatatttagacaactgcattgccgtggtgtgagttggttttactacctcaggtaaaatgataaaatacatcccattttaatgtaggttatcattgattaaatataaaatgtgtayatatggactggcctaaataaaggctactttaaatggtcatctttaattattccaaatatgcaagttacagatatttgttctagaaatttcattccagttcacataacttggaaagttctctggtgaatagtataaaagttctaggtaatagctattgacattaaactgccattgtatagtgacaaaagcatttaggtcaacaattaaagattgtttgactcagtagtattgagaagttttaaatttctttttttttttttttttttttgagaccgagtctgtcacccaggctggagtgcagtggtgcaatctctgctcactgcaagctccacctcccgggttcacgccattctcctgcctcagcctccgcagtagctgggactacagacacctgccaccgtgcctggctaattttttgtatttttagtagagacggggtttcaccgtgttagccaggattgtctcgatctcctgacctagtgatccgcctgccctggcctcccaaagtgctgggattacaggcatgagccactgtgcctggctgaraagttttaaatttctaatctattcttattcttttcttagatttggtttagtgaatatataaactaacttacaggtgtagaaaaaccagtttttcccaatctgtcaggagtcttggtattttatattttcttgtaattttttcaaaatgagttaggttaagggagaaaaaaacctttcagaaacacatcttattgctttcaaacttctaacagagggttttttctactcacaataaaagctataaaaagctctcctgatgtatttttccccatgattttcctgtataaayatacatgattgcacaatgcaaaaccaacaaacacttcttgcagtatatgttgaaaattgctgwtcttgtattcttattgcagctaaatgaaatgataagaaacccaggggaaggacatttctggcaggtggatcacatcaagccagtgtatgggggaggaggacagtgttccctggacaacctgcagactctctgcacagtctgtcacaaagaggtcagtgaagctctcatatagctttgactgcatcctgagaagtcaaatggaaaattgtgcacacagttgtggaagattatgtggatgaatttatctctggtctgagattcgaggcacattttactcctttcatcacccaacacttgcctttcctctcaaggcccgtgtcacagatgcaagagaagctgcttcccttttcattcattctaggaccaagacatttgcaccactaccaagaaagaaatgaatacagtttacatattgtcttgatgagacccggatcctcaaactggaagtttggtgaattggggcagtgatacatgtttgcatataactaaggatatcctgaaatatctgaaaacattgataagttatctctaggaccaactcagttcaacatgcaaaggtttcattgctggccaaagtatgaaaccaattaactctgccccatctttgggtagttagttacctgttgcttagaatgagaggaaaaaacacatactattgtttatctaccaggatgaattttttacaggcagtccagtaaaaggtagtgggatttacctgctgagatcatcatagaaatattcaatatgcaactttgtattcaactttttttcacttacagcaagatctaagcatttctcatgtactctaaccattcrtaacttatatcatctaaaatgactgcataatacagtattctattgagcagatctctactgtagtttacttaaccattcccatrctgattaatatttatctaaatttttttgcttttatatatcatgccaccaagcacattttttgtaaacaaacctgttttctacattttgaggtcattccttaaggtagattctcatgtgtaaaaatcacggagtcacaagtatttggatatttttgacaatgtaggaatttatcaccaaactgttttccaaagaattttactcatttatggccccagaagcccatttaactgccactgggtatggtcagtgggtgccaatgtggtgcagggagaatggcctgcaattgttttgtttgctaaagacatcgatgtttttaaaagatgctaatcagttatatttaaacttttgagtactatttcagatcctttgccaatgtttataaagtatgaactctttactactttttttttttttttttgagacagagtcttgctctgtcacccaggctggagtgtgatggtgtgatctcagcatgatctcggctcactgcaacctctgcctcccgggttcaagctgattctcctacctcagcctcctgagtagctaggattacaggcacccgccaccacacctggctgatttttgtatttttagtagagacggggtttcaccatgttgtccaggctgctctcaaactcctgacctcaggtgatctacctgccttggcctttcaaagcgttgggattacaggtgtgagccaccgccctccaccgtaagcttctcttctgtccttactgtttccgcctggaacacctcacatggacttcaattgggaaaaaaaagtcatctgatttctcagatgtgcaagttattagcaaattcaagacctataagagaattaagaaatagccaaagaaaatgcagccctttctgtaattatttttttagattctcatgaaaaatgttatttgtgggattagcagaagaatccagttctggtctatgtcattttattttctrcaccagctcatctgttgagttggaaatggcctctgggatcagagaataggaagtgggtagattttcttcgctgggtaatcccaagttgccttaagaactcccacttggggaggctgaggtggatggatcacttgaggtcaggagttcgagaccagcctggccaacatggcaaaaccccgtctccactaaaaatacaaaaattagctgggtgtggtggcaggtgcctataattccagctactctggaggctgaggctggagaattgcttgaacctgtggggcggaggttgcagtgagccgagatcacatcacttcacttcagcctcggcaaaagaacaaaactccatctcaaaaaaaaaaaaaaaaaaaacctcccacttggatgggagaatcagggccttcctagtctccaaatgaggaattcatgctgttgctgggtagcaagacatcccccaagttgtatgttttctcctgctatgttggtcctatgaacctaggacctcaggatctcagagctgctgagatactctgccttgtggtttggtaactcttccatagccaaccactggaaaatgggtgtagtgactgtagattttccaaactaacaatataaagagtttttgagcttttgtagccggtgcttttttcctaacgtgtacacatgcatattttttaacttttagagaactgccagacaagctaaggaaagaagccaggtgagaagacaatctctagcatcaaagcatggatcagacatcacacgatttttggtaaagaagtaaagtagaaaaatatatgaatgaatgacaaatggtttacatgtggaagactttaatacagaagttttccatgtttgtttaatatatcgagagtaaaaattttcagaacaaaaatcaagaattcaaattctcttctactaattacttttagtattaaatacattttgaaagtacttaacagaaactaagatacaatactgaatatttctgtkgtctttttgatttgattcagactcgcaattatgtttcagcaatgttttgtaaagctctttacccctaatatgcctaatcactgtattgtgcatagattgtgtttaaaaaatgtactctcaattacctaaaaatgcttctggattagtattgttctggactgtcataggtatgagtggaacattgcaaaaccttatgggaaatttcagacgcaaatcattatttgggaattctgggccaagcatgaccagcctgcttaggattcaagagagactgtccactaaatacctccagaatgagctaggggcacacattttgggtgttgcttttcttgctttatttcttagctagtcatctttatcaaaaatatccttttcaaaatgaggtacctatggtgtttgtggacaatttgggggttctgtgtaaagtaattgttaaaactattaaataactgaaaacataaaatgtaaaatgccacttaagcttgattttttagatctttttttaaaaaatgaataaaactaggcttactgttggctgggcgcggtggctcacgcatgtaatcccagcactttgggaggccaaagcgggtggatcatgaggtcaggagatagatcgagaccatcctggctaatacggtgaaaccccatctctactaaaaatacaaaaaattagccgggcatggtgttgtgcacgtgtaatctcagatactcgggaggctgaggcaggagaattgcttgaacccgggaagcagaggttgcagtgagccgagatcacgccattgaactccagcctgggcgacagagcgagactccgtctcaaacaaacaaacaaacaaaaaaaaaaactaagcgtactatcaaaatacactttgtcttctggttctcattttctgtttttaaaaccctgtgttattaaaggtatgtttctggtacttattttaaaaagagtgatgatgayaaaacactttataataaggcataatcagatggttatatgcatttaaatatacaataataacattaaaatgtaattgacataaaataagagtgacgatgaaacaaacccagggcctagtcctgcaatatgtcagaatcatgagggcaaagagtcagaactatacaaaatacaggaccgaggaagaattacattcccaaaagggagctgtttgtaaatactattaggacatatacctctttagtttgagcattttcccacgttaattaatagctagtgttttacaacataaaggacttgtttttagaaagattatacaatcaaagattatacaaccacagttgttcctcagtttctatttcattgtatgagatcaagtcatgttggttattttataaatgaagttgggctttctttggcctcctttctgcttagttggtcaggtgctctttgcagttttctgcctcatttccaaggtaacctaggatttgtcacggttgagagccaagaagcaggcacgctgcctttcctccagcatggggttttgcaagcgaggtctaagtaggtcaaatttgaggggaacttgctcttcagatcacactaaggtgataattctaaggagaaagttctcagatgtaagaactgtgtgatggtttgaggtgaaacaatccatgaagataggctcagtctataccaggtttcagaattctgactaattaaaaatgccgtaaggagcattgagcatttgctgtacaggacactgactggcccgtccccatcccttcctgacatgtctcagagctttgtgtcctgccttcccctaatttggtctgcattacttgtggggcacattgagatgaagggttctgagacagaaaataaagatagagattgatctaataaccgagaccgaaagggcatcttgaggactgttctttcctcctcacaatctgaaacagaagctccccactatgtattgcaaatgggaggttatgacagagggacacagaaagtgtcagagcaagtggcagatcctgagtgcagaaggaagtgcagatgccccaggaagaagacagctgctgccactcaggagatggagatggagtgaaaacacaggtgggtacaatgagtgtaaaaggataggcctggctctgaaaagactcagagaagctgcaagatacagtttaggctaagaaaacaacaacaaaaaagggctctggccaggtatgatggcacttgcttgtagtcctagctacacaggaggctgaggtaggagggtcacttaagcccaggggttcatgaccagcctgggtaacacagcaaggccccatctcaaaaaagaaaaaaggctctgggtccagggaacagagctgggaagtggtaggtgacgaaggaactcgcttacgatagggaaccatatgaaaatatgcctgtgggtaggggtagggtggggaggacttccggagcatggtgggctcacacactcaaaccttgcacagccagcatcaggctggcctgccttcctgttcccgtcactgggtgacattgatcccagacacattctgatgactagtaaagttgcttttagtagccccagagccaggaggaataattcatatggaatttttaaagacgcccactcttggcgttaattacagcccaacgtacatttcttggggagattttcctgtgacaagtgaataccctctacattttcttaactggatgggaaaaggattttatgcccatacatcttgctaataaaccaaatcccttcttcagattcttgagtgaaacatttaaaatgtagtttctttagaaataaaagtatgaggcattttaaattatatgacagacaaaaaagtcaatgctcttgagctctttacagtaaataggttgtgtttactcataggatacagaatcatggatatcaaacatcaaaaataaattrtaaaaataatgtctcattttctgttgcatattattagcctgtctctcattccaccatttgttcttttgaactggaaaattgtgggctcctagtcactgcactaatctatctgaatatccaactaccagaaagggtttatcccatctcaagtttgtcagttgctttatatcgttaagggtgtttttgccaccctggttgtgttcataattaccattgagaaatgtcactgttattaaaatacattctgtgttccaactacctgcctctctgccctagcagtttctctcttacctccstcaaatcattgactagggtctttccagcagtagcttctagctattttctggaaactggcctctggtacaccttaaaaatattgttaattattccayatttgctaaagtgtttatatttcatggtctctctgctctaacacatctgccttccctgcaactagatrtcatcattagattggagagccgccaaacacctaaactatatgaagctaaagtctgtttaagaaagagcccatccaggctgggtgtggtggctcatgcctgtaatcccagaactttggggggccaaggtgggtggatcatgaggtcaggagatcgagaccatcctggctaacatggtgaaaccccgtctctactaaaaatacgaaaaaataattagccgggcgtggtggcgggttcctgtagtcccagctactcaggaggctgaggcaggagaatggcatgaacccaggaggtggagcttgcagtgagccgcgattgcaccactgcactccagcctgggcgacagagcaagactctgcctcaaaaaaaaaaagaaaagaaaagaaaagaaagaaagaacccatcccagcactttgggaggccgaggcgggtggattacctgaggtcagggattcaagaccagcctggtcaacctggtgaaaccctgtctctactaaaaatacaaaaaattagccgggcatggtggtggatgcctgtaatcccagctactcgggaggctgagccaggagaatcacttgaacctgggaggcagaggttgtggtgagccgagattgcaccattgcactccagcctgggcaacaagagtgaaactccatstcaaaaaaaaaaaaaaaaaaaaaagcccaacatcatttcaacttttagcctccaaattgagttaaagaaagcactcttgtgctacctgaatctagcaagtgcttggcatgcatcatttacacacagatgccacagacacagcccagtcttcttggtgtaacccagattgctgtgcttcagcttagagcctttgcgatcctgcagaaatgttttacctgccttctacataatactttcttacagaactgtgacttaatttatgtcttggctttcatcaaatgggtattttttaaagccatacatgaaatattgctatgctgtttttgttcttactgttttgaaaactgctcttaggaggtttaggaaggataatttctaatgcctctctccccacatcaaactgggaaccagttgagaaatgagatgcagaaatcagacagatggaattgacaatgtcagttttgaggttaataaaagagaattctaagtcatgcatggatctgcagcaccagtcaagctctctaatacttagggcctctgtgttcaactggggccctggggtggccccctgcaggaaagtaagagttaatctatcctggagggcaagcaaacttaccccaaaacccaggcctgcagtcacttgacttcatcttggggacaatgagagaaggatccccaggccaaacttgagggcttctgtcctcagcacataaaagcagtctgttytgtagacaggctgatcagagagaaagggggcaggcgttttcatcctccatgacttctcctaaatttgccaatgggataagtcactctgcttcctttagggaggagggagtgagggtagagagaggccaaaaatttcttcttttagcaaaacttgaggtttgaggaagaggtatttcatgttgcatcactgtatgccatcttgtgcatatagcacgatgacaaaatcagtccctattgaaataccattgctcaaatactaccctaaccctggaccctggacatgtgtccactagttcttgaactccccatgggccttagaaaccatctgccaccctgacatcaatgcctgccctttctccagcctaatgtgcatctctgtggcccatttggttccttgtgcctgctgcagcttgtaagtaaaaatgactcccttccttagtgtgccatatgccagtgtggtttcatattagtagttaagtagaggtcaggcacctgattttgttcaaataaatcctgccaagggtgtttttgctttttttttttttttwaaartatttgtgaattatgaccactaatcacarttaactataaaacacgttgtgtttctagaccagtacaatccaacagaaatataatacaagccatatatgtaatttttgtggtaaaatttatcattttaattgtttttaaatgtacttaaattggtattaagtacattcacattattgtgtaaccatcatcaatcaccatgcatctctagcactttttattatcccatactgaaactctgcactcactaactctttccccagttcttggtaaccacctaatatagtttggctatttgcccccacccaaatctcatgttgaattgtaatcctcaatctggaggtgggggcctggtgggaggtgtttggatcatgggggcggatccctcatcgcttggtgctgtcttcatgatagtgagttcttatcagatctggttgtttaaatgtgtggggcacctccctcgccactctctctctctctcttgctcctcctttcaccgtgtgacgtgcctgatcccccatcaacttctgccatgattgtaagcttcctgaggcctccctagaagctgagcagatgccagcaccatgcttcctgtaaagactgcagaaccatgagccaaatacacctctttttttttttttttttttttttgagacggagtctcgctcttgtcactcaggctggagtgcagtggtgcaatctcgctcactgcagcctccgcctcccgggttcaagtgattctcctgcctcagcctcctgagtagctggkattacaggcacctgcaccatgcctggctaatttttgtacttttagtagagacggggtttagccatgttggccaggctggtcttttacttctgacctcagcctcccaaagtgctgggattacaggtgtgagccaccacacccagccataaacttcttttctttataaattacccagtctcaggtatttctttatagcaatgcaagaatagtgtaaaacaccaccattctactttctgtcagtatgtatttgactaataatctaggcacttcatataagtgcaatcatacaatatttgtccttttgtgtctggcctatttcacttatcattatatcctcagggtttatccatgttgaagcatgtgtcagaatctccttcctattttaggccaaataatatttcattgttatctactattttttttattcattcatccatccgtggacattggggttatgtccacctttcagttgttgtgaataatgctgctatgaatatgagtatgcacatgtctgtttgaaactccgttttcaattctttggggtatgtactcaaaagtggaattgctggaacaaataattctagtttaatattttgaggaaatgctacattgttttctacagctgcaacattttacattcccaccagcaatgcacaagggttccaatttctccacatcctcaccatcacttttcattttgttttgttttatagtagccatcctaatgggtttgaaatagtatctcattgtggccttgatttgcttttccctaatgattagtgatgttgagcatcttttcatatgcttattggccatttgtatattactgttggagaaatatctattcaagtcctatgcccatttttgaattgaattatttgcttttattgttgagctttaggagttatttgtatcttctggacattaattacttaccagatatgtgatttgcaaatcttctctcttattctgtgaatcgtcgttttactcagttgaatgaactttacacaaaagttttaaattttttatgaagcccaatttgtctgttatttcttttgttgcctgtgcctttgatgtcagatctaggaagtcattgccaagtccaatgccttgaagcctttcccctgtgttttcttctaagagttttatagttttagttcctacatttaagtctttgatctatttcatgttaatttttgtatttagtattagctaaggtccaacttcattcttttacatgtagatgtgcagtttccccagcaccatttgttgaaaagactgtcctttccccattgaatgatcttggcacccttgttggaaatcatttgaccatgtaagtgtggatctatttctgggctctgtactttattccattggtctatatgtctgcctttatgccagtaccacactgttttgattactgtaactctgtagtaaattttgagatcaggaaatgtgagacctctgatttctttacaagattgttttggctatttggggtcccttgagattccatataaattttaggatggacttttctatttctrcagacatatcagtaagattttgataggtgtgttaggccattcttgtgtcactataaagaaatacccggcctgggtgtggtgactcacgcctgtaatcccagcactttgggaggccgaggcaggtggatcacctgaggtcaggagttcaagaccagcccgaccaacttagagaaaccctgtctctactaaaaatacaaaattagccaggcatggtggcgcatgcctgtaatcccagctactcgggaggctgaggcagaagaattgcttgaacccaggaggcagaggttgcggtgagcaaagaacatgccattgcactccagcctgggcaacaagagcaaaactccatctcaaaaaaaaaaaagaaagaaaaaaaaagacccaaggctgggtaatttatgaagaaaatatgtttaattggatcacagttctgcagactgtaccagcacggctccagcatccccttctggtgagggcttcaggaaccttacactcatggcagaaggcaaaggaagagccagtgtttcatatggtgagagcaggaggaggtaccacatacttttaaaccgccagatctcacaggaactcattatcacaaggacagcaccaagtcatgagggatctgccctcatgagccaaatacttccctccacgccacacctccaacattgggatcacatttcaacatgagatttggaggggacaaatatccaaaacatatcaataaatattgcattgaatctgtagatcactatgagtagtattgacacatttactatattaactattccaatccatgaacatggaatgtgttttcatttatttatttatatcgtctataatttctttcagcaatgtttgtagattttagtttataggtctttccctttcatggttaattcctacatattttattctttttgatgctagtataaatagaattgttttttaaatttccttttcaattggttcattttcagtgtatagaaatgaaacttatttttgcatgttttatatcctgcatctttgctaaattcatttattagtttttacagagtttttaaaatgtggaatctctaggggtttctatattaagatcatgttctctgcaaacagataattttacttcatcctttccaatttcagtgccttttctttttttttcttgcctaattgctstggctagaacttctgttagtgttgaatggaaatggtgaaagcaggcatgtcttgttcctgwtcttagaagaaaggcttttagtctgtaatcattaaatatgatgttaattatgtttttttaatatattgcctttattatgttgaggtagtttccattcctagtttgttgattgttcttattgtaaaagagtgttgaattttttgtcagattctttttctgcagcaaatgagatgatcatgtggtttctgtcctttattcttttaatgtggtgtattacaatgatccatttttatatgttgaatcatgcttgtattccaggaataaatacaactttgtcatagtgcataatcctttaatatgctgctgaattcagtgtgctggtattttgttgagcatttttgcatccatgttcataagggatactggtttgtatttttcttctcttgtggtgtccttgtctggctttagtattagggcaatgctggcttcatagaatgagttaaaaattgtttccttgaccagcctggtcaacatggtgaaacctcatctctactaaaaawaaaaaaattagccrggtgtggtagtgcgcacttataatcccaactactcaggaggcraggcaggagaatcgcttgaacctgggaggcagagattgcagtgagctgagattgcaccactgcactccagcctggacaacagagcgagactctgtctcaaaaaaataaaaaaagaaaaaaaaatgtttcctcctcttcagttcttagaagaatttgagaaggatttatactagtttaacttcagtagcatacagaaactctacttctagtccaggcatggtggctcacacccgtaatcccagcactttgggaggccaaggtaggtggatcacctgaagtcaggagttcaagaccagcctggccaacatggcgaaaccccgtctctactaaaaatacaaaaatgagctagatgttgtcgtgcacgcctgtaatcccagctactcgggaggctgaggcatgagaatcgcttgaacctgagaggcagaggtcgcagtgagccaagatgtgccactgcactccagcctgggtgacagagtgagactctgtctcaaaaataaataaataaataaaataaagaaactctacttctatacagcttcatctcaacccctttaagttattaatgctacaagattctatttttatgtagtgtgtgtgcaaaaacatagactaataattgtttttttaatgcattagtctcttaagtcatgtgaaaacaaaaactggagttacaaaccaaggttacaataatactagcttttataatttcccaagtatttatctttgctggagatatttcttcatatggttttgatctactgtctcatcctttcatttcaacttataggactccctttagcatttcttgcagagttagtctagtggtaataagctctctcagcttttatttattttaaagtattttaatcactccctcatttttgatggacagttttgccagatataggattcttggttagccattttatttcttgcagcactttgaatatatcagcctactgccttctggcctccaagacttctgataagaaatatgctgataatttttttgagcaccctttgatgtgatgaatgacttctgttttgctgattttaagattccctctgtgtttggtgtttgacagtttattagaatgtgtctcaatgtgggtttctttgcgtttatattcatccaagaatataaacactaaattgcattaaatttgggatttttttttttgccattattttttcaaataatgtctctgctacttgtctctctcttcttcttctgtaactcccatactgcatatgtttgtcagctttatggtgtcttacagatcccacaggctctgttcacttttctttaatattttttctttcttgttcctcaggtgataatttcaattgtactttcttcacattcactgattttctcttctgcctgctcaaatatgcttttgaatccctctaatgaatttttcatttcagttattgtacttctcagctccaaaataaaatttttgtttttttgagagagtctcactctatgcccaggctggaatgcagtggctcaatcttaggtcactgcaaccgccacctcccaggttcaagcaattcttgggcctcagcctcccaggtagctgggactacagggccrcaccaccacacccagataattttttttaaagtatttatttatttatttatttatttttattatactttaagttttagggtacatgtgcacattgtgcaggttagttacatatgtatacatgtgccatgctgatgcgctgcacccactaactcgtcatctagcattaggtatatctcccaatgctatccctcccccctccccccaccccaccacagtccccagagtgtgatattccccttcctgtgtccatgtgatctcattgttcaattcccacctatgagtgagaatatgcacacccagataatttttatatttttagtggagacagggtttcaccatgttggccaggttggtctcaaactcctaacctcaggtgatctgcccacctcagcctcccaaagtgctgggattacaggcatgagccaccacgcctgactcaacatttttttgttcctttttatgttttctgtttctttattgataattccatattgttcatacatcattttcttgactttgtccacctcttcctttagctctttgaacatctttaagacagttgtcctaaagtctttgtctaggaaaaagttttctactgtttggtctttctcagagactatgtctggtgatttaattttttcttttgaattagctatactttcctgtttgtttgtatgccttgtaattttttgttgaaaactggacatttgaattttatattttggcagttctggaaatcagattctcctcttccccaaggtttgtggtttactgggtttgtggttgttactgctgttgttttttggtttttttgttttgtttttttggtttttgttttctgtttttgagacagagtctcgctctgttgaccaggctggagtgcagtggcgcgatctcagctcactgcaacctccacctcctgggttggttcaagcgattcttctgcctcagcctcttgagtagctgggactacaggtgtgcaccaccatgcctggctaatttttttgtatttttagtagagacagggtttcaccatattggccaggctggtctctaactcctgacctcatgacccacccaccttggccccccaaagtgttgggattacaggcgtgagccactgcacccagcctgttgttgctgttcttactgtagtcgggtgactttgtgccaggcattcacccaagatgtaaatttaagctcttcttgggtattttctgagtctaaatctttccctggacatatgtagtgactttctgaattccctatatatgcagctgctttttgatgttccattattcagatgtggcttccaaaagggaaaagagggaataacaaagggggcgggaggtaacaggctctggatctttaaatattctgaaacctacttcagatggtgaggttgcaacagtggagtctgcctctgtgtctgcacctctatgatcagaagcagcattcagaacatagatccctgatatctggaagacaaggtcctaattcccttctctaaattccacaagctgtgtgcaagctgcaccaagtacacgtgcatgactgactgccatggagctgggaaaaggggatggttagccactaccgtgcaaagagctgaaattgaccaaaattaattgcaatttactgtctaagccttcctttggcagctgcaagcctttgaatagactccagagttccagaatagttacatcaaacagattctgccagtgtaattatctagatagggagacagagtcctatatttcccacgctaccatcttgcctgatgtcatccacatatgtagttttaaattttttagtggctgctttaaaaagtgaaaaggaacagataaatattttaacaatatattttacttaaactagtgtatccaaaatatgattattttaacatgtaacaatataaaaattggtgattttcatactaaatatttcaaaaatatatattgtatacctagagaacatctcaatcaaagatgctaaattttcacatggctcaaagtgaaatgttagcactacccaaacacaataatgtgtgtgctatagcagcaaaaatcatttcattctagctttagtttctcaaattaattcaagcatttaacaaaattaaaaattcagttcctcagtctcagtagccacatgtggcagtgctgttgtactggcagcgtggctgtaaacacccacttccaaaacaggggatgtgtgaggtaaggtttgatttggttctcttttcttttttcttttttttttgttgttgtgtatgtgtgtggggtgggagatggagtctttctgtgtcctgcaggctggagtgcagtggcatgatcttggttcactgcaacctccgcctcctaggttcaagcaattctcctgccccagcctccctagtagctgggattacaagcacccgccaccatgcccagctaatttttttgtatatttagtagagacgaggttccaccatgttggccaggctggtctcgaactcctgacctcaggtgatccgcctgcctcggcctcccaaagtgctgggcttacaggcatgagccactgtgcccggccgggtttactgaagggcattctgttccttcctttttcaaaattcgtactggattaggtgagacagttcccatgcaaggcaggcttcaatctgtagaaggctgggaagtcgctgttaaaacagaagcctccacagggaatccctccatccctcctaagactaaccatcaacatgtgggtgagtggttatgtcttctaggccgtaagtttccagcagggatggaagcgtgcacagccatgtygtgctcgtcttctgttctggaagcagcaacgctttcattctcagtccagcatagggcctgccacttgtgataagagcagtgctggcagcagcttcagcttcattttacaaccctgagaagttctgccctgtttgtggggattcgtgctgtgaacatccatgcagtagaattcctgctgcttgcaggaagtttttaatagagctgattgagcaagacaaagaggacttctgaattttttaaggtttttaatttttcaaatttagtacagtatggtaagcctcaggaaatgcagattaaagccataataagaggccgggcacagtggctcatacctgtaatcccagcactttaggaggctgacgcaggcagactgcctgagctcaggagtttgagaccagcctggccaccatagtgaaaccccatctctactaaaaatataaaaaattagccaggtggtgtggcacgcgtctgtagtcccagctactggggaggctgaggcaggagaattgcttgaactagggaggcaggggttgcagtgagccgagatctcgccactgcactccaggtgggcaacagagtgaggttccrtctccaaaacaaaaccaaaccataaaatgatactattttacaatcatcaaatttttggtaaaagaaaaaaaatattgtctttgtcaacaacacccaagagcctgtaaggatatagactaaaacgaaccctcatccagaactagttggactgtaaattagttcagccactttgggaaacaactggacattatcaaatgaagtcaaaggtgcagatccttcactgaatgtacacactagagaaactgcatgtgatggaggcgacactccccgggttgcttagagagcactgtttgtaacaggaaaaagtctgttacgaacccaagtgttcataacagaagaatggataaattggatatattcacataataaaatactatatagctatgaaaattaatgaagttatgtgtatcaacatggtgatgtcacatatacaaagtacaacacaaatcaggaccaatacatacactgtgatttcacttacaagaaggtcaaaaagaagctaaactggatagcaggtcaggcgcagtagctcatgcctgtaatcccaacactttgggaggccgaggcgggcagacagcttgaggccaggagtttgagaccagcctggccaacaaggcgaaatactatctctacaaaaaatttaaaaattagctgggcatggtggtgtgcacctgtagtcccagctgtttggaggctgagtgaggtaggaggatgactcgagcctggcagatcaaggctgcagcgagccgagatcatgccattgcactccagcctggtcaacagagtgaaatctctgtctcaaaaaaaacaaaaacaaaaaaacctcaacttgatagygtattgtttgggaatacattcctatgtggtgaaactacgaagagaagcaaggcagcctgcttgtagtggctcacacctgtaatcccaacactttgggaggcagaggtgggaggattgcttgaggccaggagttcaagaccaacctgggcaacatagcaagactccttgtctacaaaaaaattttaaacattagctgggtgtggcagtgcacacctgtagtcccacctactcaggaagctgaagtgggaggacctcttgaggccaagacttagaggttacggtgagctgtgatcacttcagtgcacttcagcctgggcaacagagtgagaccctgtctctttaattaaaaaaaaaaaaaaaagagcctgggcgcagtggttcacgcctgtaatcccagcactttgggaggccgaggtgggcggatcacaaggtcaggagatcgagaccatcctggctaacacggtgaaaccccatctctactaaaaatacaaaaaamaaaaaaaaaaaaattagccgggcgtggtggtgggcacctgtagtcccagctactcgggaggctgaggcaggagaatggcatgaacccgggaggcggagcttgcagtgagccaagatcacgccactgcactccagcctgggtgacagagcgagactccatctcgaagaaaaaaaaaagagagagaagtgaggcactggttaagagaaaacccagagagtggttacctgttttctttaaggcacagtcatgctctgaagtttggtttaagtcacagtgatcattgccattctgtataccttccaacatacacatatttggaaatctgaactatttcataacagaaatgccacctagcttagctaaaaggaattataggaaatatacttctctatagactcatgtgcatgctcaattaattagtcatatattgtatatcatttaagtgggttaaagagcagtgtaaataaaacatggcycctgcccctcaagaatgttccatctagcagattcagaggcttgcccatccgtggcacaatgtatcctgacagtcacagctggcctcctctgggcaggcatgaagtaattcattagattagctagcatgaaggctctgccatattaagtgtaatggggggtggctcataagtgggggtgtctgaggagtgggcctgaccaattggtaaattggatgattagtttgaaatggcaggatttcaaatacatgcttcacccattgtgtagttttgctgaaaatcagttctgaatcttaggtgttctgtggcaaataaaaggcagatatcatatcctcattttgccactggaagaattgagacatttgctggcttactctgttcagaaatacttggtgcatggaaatatcccaaaggaaccctggtgggtttatacttagttctgtgtgtcctcgtgtttaacaagctgagcgtgctcaaccttgggaagtgcaggtgtccttgggtgttgctggcttccaggcctgctggggggcatcattttggagcccatgcgagtattttatgggtaaacttttcatccagcatcctactcccacctcccacaaacgctcttgattctgagcagccatgggccaggcttttggacctaacaggtaacattttgataggtgtattgctggaaggctgaagagcacatggatcttcaaaaggaagcaaatcaggatagctgaggaaaaaaacaccaattccagtgctcagtgagaatgtatacaattcctgctaaggcatctgctctatgggctgttttatcagtctgattaacggagggaccaaatacatcctcacagttaattgacatgatctctgcccttacttattgttattctatttttatggttatttttattaacaagaaaactattgtttctagtgaacttaagatggctgaatatcaaacctaacaatttaggatgttttcccagagtcttccaatcattcctctgaaaaatgagggagcatttgattcctaacttcctcttctcccttcccacgacaagccatagaattacaagcacaggtataaatatctttcagctgattaaatggtgtcctgccaaaagaagatttgttttgagtataatttcttggatgctcttctaaaggagaatgatctttctttagaggcctccatggaaacgcagtgttacattttccattcttttagagaagggtaacaaaagaactatcttcctgctgaaatcaagaaatcgagggttggaggatcctaagctgtccagaaccctatgactgagtcagctggtaattcctggtaagaacttggcgtttttgaagccgcctgggccggataagtcaggaggtccaaagcagccttccagatcaagtcctgcagtggaagcacctcctcccatcctccctccaaatcaggaaatgtgctcagagctaggtttggggacaatttgaacagacagtctttgttccctgcccagcacattcccacctggtgggagctaaaagccgcagcagggaagggtctatccctctgagggtcgggaacataacggggctgcagcgttcggtcccttttgctcttctgagtgccctgcttcttgtcctgaccctggaacccaaccctgtgctcctggaacttacataccattctyttcctgtcaaacgtgagccttctgtgaaaaacaatgcctggttgaagtttccctgagaaacctgcttgtttcagacacagatctgctaacagcccagatggcaggatctctgaccagcctcctgtcgttgaaaaagggtgcttggggaaggtcttttgttgagaggatgcattaaatccttcttagtggggtcagccccagtccttgcataaatacctcctgtggattcgatcttgaaggatgggtagatcccaaaaggagggcacccttcctgagctccagaagacttgcagctctttcccatactctatgcagctgtggctgcatagaggaaatttatcctttccactactgcaggccaataggccctgtgagaaacgagtgatgaacatgatcgtgtttctgcagcactcgcctacctgtgactcccagaaacagtagcatccatgtacctggagagcagcagccccaggtggcatcttcccatggccacacctccagcctggccttccctaaacccccttacacgcagccgccagagtgctgggtttgatcactgagaggctaaatctctgtcatgtgactgaatgacttactgaccatctgtcattattttagggaaatatttgttaaaaggattttttataaagatagatgactttcctaaatgctcatgtaaatgaaatagtttttaaaaattaccactcacaaccataaatatcctttttttgttgtgtgtacccacacacataaagatatacataagacatacacaataaaactgcactattataaaggttctcataaattggaaattggcttccrtcctccactcaggccctggctaaagctcttatcctactgggagaagaggagacatggaggggccggcgaggtcaggtggcaaaagagaaggccccactgaggcccggggtggagaggcagaagtgggactccacactcccttatcctccctaactcatcccttcaaacccggccgtaagatccagaattgtccccatcactatgcaagctgctgccagtctgcataagccagaccagctgggggctcccagctggaccctcagactcaggcctcaggctcggcggactggctgcagcctttgcattgaccacttgataatgcaatcctgcatcttctgtgatggaaacttttagtcccacattaggatagaaatatatactatttttattttatttcattcatttatttttgagacagagtctcactctgtcacccaggctggagtgcagtggtgcgatgtcggctcactacaacctctgcctcccaggctcaagtgattctcctgcctcagcctcctgagtagctgggattacaggcgcataccaccatgcgtggctaatttttgtatttttagtagagacagggtttcaccatgttggccaggctagtctcaaactcatgacctcaaatgatccacccgcctcagcctcccaaagtgctaggattacagggtgagccactgtgcccggcctaaatataaactatttttttaaaatagtaaaatgaacagcagtgtacctcccacctagctgaaaaatagagtattccctctgcctttaaacctggtcccctgctgcccaagtacgttccctttccttccccataaacagacccgctctcctgaattgtgtggaaagcagccctttgcttttcttcatgagagtaccatgtatgtgcatattcctaaacaggttattgttgagttacttgtttttgacctttagataatgaaattatactgcatatatgtctctgtgacatgcttctgccagtcacttttacgtttgtgatactcaccatgccaataagtgtaataatagtagttcatttcttttcactattctgatataaaataattatcctttccactgttgaaggacatcagagtttccagtttgtggtttctctaaagaagtgctgttgggaacattgctgttcttctctcctggtgctgtgtgcaaacatttcttacccttggatgtgcatcagagtcacctgaagggcttactgaaacccaggttgctgggccccagccctagagtttctgcctcagtaggtctagttgctggagaatttgcatttctaacaagttcccgtgatactgatgctgctggtctagggaccactgccctaaagtacatcccaggagcagagctactgtgttgttggatatgtatttgttcaaaccttattaggtaatgcaaaattattttccaaagttgcaccaatttgcagtcttgccaacaatgaatatgagttcctgttgctcagaatccttgtcaacatttgaatattgtctaacttcaaaatgtgtgcccatctggtatgtgtgaaatggtgtctcgtgattttgatttgcatttttcaaaatactaatgaggttgaacaacttatcctgtgtgttttgctcattcctctttcctcttctatgacagacctcttcctatctttgtgtgtgtgtgtattttgctattaagtttttagtcttttcttactgattgaaggtggggattataaagtctgttctgcacaataatccatattgattgtctaggtacaaatttattttcctattctgtagcttgtcttttcccattctgtattttcctagtcctagcttatcttttctcattctgtattttttcttttttgatatggagtcttgctctgtcgcccaggctggagtgcagtggcatgatcttggctcactgcaagctccgcctcccaggttcacgccattctcctgcctcagcctcccgagtagctgggactataggtgcccaccactgtgcccagctaattttttgtatttttagtagggtcggggtttcaccgtgttagccaggatggtctcgatctcctgacctcgtgatccgcccacctcggcctcccaaagtgctgggattacaggcgtgagccacctcacccagcctcattctgttctttctttattaaacagaagtccttaatattaacggagtcaagtgtatccatcttttcctttgtggttcatattcttttgtgtttatttaagacctccttgctttggaattttaaagctactttcccacatagtattctaaatgttttatgtatttgtgttttacagaacagtatttagtctaccagaaattgattttttgagtagggagtgatgtagggttccaattttatttttcctcttgggatacaaggataacctctcatccttgtatgagaggtttactgactattccatcttttcccactgatctgccttgctgtctctatcaaaactcaagtttccttatatggacagtctgcttctgaactctctatctgttctattggactactttaagtcagtgccacggtttttttttttttaaactgctgttttttgagacagggtctacctctgtcacccaggctggagtgcagtgcaatctcatctcactgcagcctcaggatctcaagtagctgggactgcaggcacatgccaccaagcctggctaatttttcctttttttttttttttttttttttttgaratgggtttcactctgtcaccgcagctggagtgcagcggcatgatcacgtctcactgagcctcaacctcccgggctgarcctcccaagtagctgggactataagcatgcatcaccacatccagctaattttgtattttttgtagagacagggttttgccatgttgcctaractggactcaaactcctgggctcaggaaatctacctgcttcggcctcccaaagtgctagggttacagacgtgagccactgtacccagccatttttactattttctttttataragatggggtctcgctatgttgcccaggctggtcttgaactcctgggctcaagtgattctcctacctcagccttccaaagtgctgggattataggtgtgaaccatcatgtgcagccttaacttttgcttttaattgaccataagaattgtacatatttatggggtacagtgttttcatacaagtatagactgtgcaataatcaaatcagggtaattagcatatccatcacctcaaacactgttgcgggaagtcagggaccctgaatggagggaccggatggagccgtggcagaggaacataaattgtaaagatttcatggacatttatcagttcccaaataatacttttataatttcttatgcctgtctttactttaatctcttaatactgttatcttcgtaagctgaggatgtacatcacctcaggaccactgtgataattgtgttaactgtacaaattgattgtaaaacgtgtgtttgaacaatatgaaatcagtgcaccttgaaaaagaacagaataacagcgatttttagggaacaagggaagacgaccataaggtctgactgcctgtggggtcgggcaaaaagagccatatttttcttcttgcagagagcctataaacggacgtggaagtaggagagatatcactaaattcttttcctagcaaggaatattaattttaataccctgggaaaggaatgcattcctggggggaggcctataaacggccactctgggaatgtctgtcttatgcagttgagataaggactgagatactccctggtctcctgcagtaccctcaggcttactagggtggggaaaaaatccgccctggtaaatctgtggtcagaccggttctctgctcttgaaccctgttttctgttatttaagatgtttatcaagacaatacgtgcacygctgaacacagacccttatcagtagttctgcttttgccctctgtcttgtgatctttgttagacccttattagtaggtctgctttttgcccttggaagcatgtgatctttgtacctactccctgttctcacaccccttctccttttgaaacccttaataaaaacttgctggtctgatactcaggtgggcatcacggtcctactgatacgtgatgtcatccctggtggcccagctgtaaaattcctctctttgtactctttctctttatttctcagctggccgacacttatggaaaatagaaagaacctatgttgaaatactgggggcgggttcccccaataaaacacttgtcatttctttgtggtaagaatattcaaaatcctctcttctagttatttggaaataaacaatacagtattgttaactatagtcaccctactgtgcaataaaacaccagaacttatttctcgtatttaactgtaactttgtacccattaaccaacttcttcccatttcccgctatcccccaccacctccccggcctctggtaactactattctactctctacttctatgataccaacttcttcagatacctgatatgagtgagaacatgcagtattcattcttctgtgcctggcttattcacttaacattatatcctctctgttcatctatgttgtcgcaaatcacaggacttcattcttttttttaatcactgaatagtattccattgtgtatgtgcmccatatatatatatatatatatatatwttttttttttttttttttttttttttttttgagacagagtctgcctctgtcacccaggcatggagtgctgtggtgcaatctcggctcactgcaacctctgtctcccgggttcaagggattctcatacctcagcctcctgagtagctgggattacaggcatgtgccaacacgctgagctaatttttgtatttttaggagaggcgaggtttcactatgttggccaaratggtctcgaactcttgacctcaagtgatccacccaccttggcctccgaaagtgctgggattacaggtatgagccactgcgccgggccatgcaccacatttttaatccattcatctgccaatggacactytggttgattccacatcttggctgttgtgaacagtgctgcaatcaacatgggagtgcagatatctctttgatatgctgatttcctttcctttggttagacaacctgtagggggacggttggatcatagggtagtaccatacttttatagtatagcattacagtaagtctatcttatagagcaatatccatgaccttattcttcaagaattgcttggttgttcatggccttttgcacttctatatacaattcagattcaactattctaattccaccaaaaaacaccaaaaaccgtattttggggattttgtttggaatcatatgtcattgtggggagaatggacatctttgtggtaccttatctttctgtacaagaacaatggtatgttaccaaaataatataacaatggcaatattgacattatcaacttaaatgtcttttaattctttttcaataaaggttcatgattttctctctggaaaccttgcatatcttttgccaaatttatcagtagctctctaccacgtctgatagagttcgaatttgaaaacctaggattcaaatttgaaaacctatctcctaattgaaaatgtatcccctaaatyagctctatggccactttgccaagttctgtcctgagaagtgacccaacatagcttttgtcttttctctccgtctgaacacacagaagaaaggaaaagttaagtgggtagcaggggaacgggccactcataatttctacttaacatagatttttatttacctgtgagaaaatgatctgctctaagagcatatacaatttggatatttgcagaggtctcagatgaaatcttcagtgatgaggccacayctatcccggctcgctcaaggattgttggttgcattgtttccattacaacccagctggatccttgctgggttcctgccagcagcttccacacacctggagtgggttggcttttcctgcaggtttgcttctatgccagctcctgggagcagttgtctaccaggacacacctggggagctgataaacacacaaaagaaacatgtctggctccccagccagatggcaaggcctgaaacccctgagcgttttggacaggtttgctttactgatgggacagcattaaccctgctaacacctgtgttggggaagccttcttaccatgtccctcggtggcagggagggagcctacacacytattcagggtaatttgctcacctggactaacccccaatggggatttcagcctcctacttgagtccctaagaggacaggccattgcttgtgtttttttccccaaagtaacaacaggagtcaagaaaatcaatgaagagtattcctaggctgcggagtccactgctgacagtggaaagccctgtgcagagacagccacttgccactgggacagggcaggatagggcacgtcccaacccagcctcagtggcaacggaagcccttgggtgggactcagccacagccacagccacagaggaggctgggcctcccaccgtcgcactcccttcgtgatgttgtgacttcagtcccagaatagttgaggacgtttgggaaattcacactctaaaaatatttcattttttcatataggcaagataacacagcagagtgacagtgggttactaagaatgcagttccctcgttatgtaacatgggcaaaaatagtgttttgggccaaaatagggctgagaaagaggaatgtgaacaaacagcatggacaagtcattatttactcaaatcgtcctgtggctgggggggctttggaagagctttgatggtgtcccatctggccacagccgaggccacctttctgaagcaaagtttaatggaagcaaaggtgtctgtagaggaggctgttttaaggcaaggccctggcccagcacacaggcaggctgggagactcctggatgagtgagggacggagactgcctcctgggacaccatcccattttggggcacatgctgaagaggaggggccattccagagcacaggtcacacagcgctcctgtcatggggcttgtggtgggctggtggcagggccccmaccctgaggggctgggccatgtcgccaccctctccggatggggtcccaagttgggggtcttctggttcagctgcatccttggctgctaagctaaggccaagaacgctccctgcaagaggggggactttccactttggagggatctatccatgaccacctgtcagacatcacaagcttccaggggaggagctggcagagaagttgtgcttagatgaagtagcttgagtttgtgctacaagaactagccaagttccacttttgagagccaaagaaatgccagcggcagagtccctgggcttccaggagctaatattctcaaacttagtctcatgatgccagatgaccgtaaattagaggccagaagatttaaacacaagagtggggcctcttttgccatagaggcatcgaggcatccatccatccaaccatccatccatccacccacccacccctatctgttacagtgtgcccagaagagaggagctggcagtaggggccaggacagtagacgggccacctgttggactgaggcaaattggcagctgcttcatgaccttctccccttccacatcctgcccaccaatgcctggcaaggagcaatgcaagaaacccaaaccccacctggtttggggcagaagttttaagtgcacccaccctgctagcaaaggggtactgaccttcccagactgccctcgaggcagccccttctctattctttcccagtaagaagtatttgcctctctctgaatgcatttgctcctctgcatagacagacacaacagtcgcctcttagtcctcatcttacttgtcatctcagtggcatttgacacaattgatcaattcccaccctcttgaagtatgttttttcttagcttctaagacatcacacgtttggttttccttctgccttagtaactatttcttcatcttttctgccagtctttgtcctcctcttcctttctcgctcaatccccagacctcttctgcttgggtgacctcatactgtccatggcttaagtactatctatgtttcccaatttattatattataagccctaaccctttccttaagctccaaacttatatagccaaccgcttgggtattagttatctattgctgcataataaattacccccaaatttagcagtttaaaaataagcatcttacacagtttctgagggtcagtcatctgggagtggcttagctggtggtccaggcccaaggtccctcctgaggctgcagttacctgcaggccaggaggatccacttccaagcttactcatgtggctgttggcagggaccttccattccgcaccaygtgggcctctctttacgaaccaaaatagaagttgcaatggctcctataaccaaccttgggagtgacataccaacacttcctccatgttctgttgttcagagactaaccctggtacaatgggtgtgggtctgggggacttcacagggtgtgtgagttggaggcaggaggctggccaccacagccatctaataaacctctaaaaattaacatggcccaagctcaaattcatcactcgcagcagccccacaacttgctcttccctgtcttctccatcgtagtaaatgacagcatcattcactcaggtcccaaaccttcaagtcatccttgactctcagaccctcactgaatccatttgtaaattctgcacattctgccttcaagatctgtatcaaatctgatcccttttaccctccatggctaccacaccagtccagagtgctctcacctcccctcgtctcactagtttcactacttccaccccagcctctgcagtgtattttccacacagtggccaatgggatttttttttttttttgagacagagtctcactctgttgcccaggctggagtgcaatggcatgatcttggctcactgcaacctccaccttccaggttcaagcaattctcctgccttagcctccagagtagctgggactacaggcgtgcaccaccatgcccagctaatttttttttttaacttttaatagagacggggtttcaccttgttggccaggctggtctcgaactcctgacctcatgtgatccgcccgcctcggcctcccaaagtgctgggattacaggcacgagccactgcgcccagccccaaagagatttttaaatgtcacatcatgacattccctggttcaaactctccaatggcttcccttcttaatcaagaaaacaaatctcaactcctacagctttacacatctggcccttgcacgtgtgcaactttctttcctgcccctcttcccctcactccccttcagccacagtggccttccttctgtgcttcccacgtgccgggtacactcctgcctcaggcttttcattggccaatccctgtctgcagtcttctcctagtcatctatatacaggactgcttcctcacttcagtctctgcccaagtgtcactgcctcgtaagcccctcccttatcaaacctcctagaagacagactcccttcctagacccactgctgacacttggtgtcccacactgtgagcttcctgagcaccaggtcttccacgttctagtcactgctgtctccctgatgcctagaacagtacctggcacatagcaggtactcaataaacatttgctggactaatgaatgaaatataaacataaatgcttagggttttaaaataccccaacttgaagaaaaatctgaattattacagtggtataggaatgtatgggggtaggagggccctggagaggccatttcacaagcatgtgcacctcttaggagcacggtctcaggcacacaggtggattaaaaaacacattgcagttgtaattgccacctttcttctaaggagcagacagtttagctcaagatatacgacagctgtatactttcttagcatctcctctcctgccagagtgtggcctttctaaaacccaccatgtcactcccctgcacaaaacccttcagtgactcactaccgccccaaaggcaaagccctaacttgtagctgcggcttcccccgaacttcttggtcttgccttagttcacctcaccatcttcatttcttgccccttcccactctagataccacacttcagccaaatagaaatgttggctgccccccaaatagacattttcccttatttctgggattttgcccattccgttcctctgcttgtaatacgctttctgccccctcctgtcagttaccttttgccccaactctcaccctagagtggccttcttcacagtggcttcaaggctcctggcaagaagggagggcaagccccaatgtgcaaggacttgtcaagtctctgtctgttgaccaaagaaagacatggccgagaccagattgaagaggtggagaaataaagcacttcacaatgaaaatcatgatttcattgcacacagggctggaggaatgcctggttctctgcaagccatttcccatacgccccccatgctttccccagtgcctactcagcttctggtctcaatcccaaaatcacaccctctggggtaattttcctgatccycaaagcctgggtgaagaaamtcctacaacactttatgacattgctgcatttattactccgtactgccaatgaatacatgaatgtaggattacattcaattatttgtaggataaatgcaggccctccgatccacacagcagagttgactatactcaacattttgtggcaacgtggtgtcagttttccctgtaagggagtgtgttttggtttctgttttatcttcattgcttgtactgtacctgacacaaagtgggtacttaaatatatctgtgaaataaatacataactatcataaaaataaaatggagtactttaaaaaggcacaaagaatgttcttgagaccactgccttgttaggctcagcaggctgcaaacattagagctgagacagcacaaaaccacatgaaattagactgaaatgcctcagcgggagaaaatgaaagaaaacgccacagaaagcgacactttccttttattagattcacaatgcctttgtaacgcccaacctctcctttgtagaatttttctttgttagaaaacagacaaactctgtccttaggaaccgtcttctacttggtacagcactggcctcaggccgcctgcatctgcgtggaccagtaagaatgaagtccagcagcatagagaaaagcatcataaaggctgggaggtcatcccccagggcctcccctacttcacatacacagagacgtgtgcatatgtcacacacacacacatattatatatagatatgtatttttttttttttttacaaaaataacagggtttgcacagctctattaattttttaaaattacacaggcaaggtttatgcttcagtataaccatttttactttggatttaagtgggaattttaggcctaaaaataagattaccaagcagaggccatctagccacacagacacaagacatcttgagctccatgaaactagaaatgtggtgatgtcatcctcacacgggggggctacacatccccatcgattattttaactaaaatacaaaagcaaaatagtgtgttaaaataatcctctactcaatgcattagcacatataccaaattatactatctgcatgacagtctctaggtaccaagactgtatttttgcaagtgctattctctacttcattaaatacagtacccagccagcaaccacaaaaagagaacgcatgctgtacagcaagagaaggggagggagacgattttcagggccataacttccatggcaaccaaaagaaaaataagtaagacaaatctcacatgacagatataaaactaatttgcagtgacatttgatatatagttttatcagaagtaatacatttaggttacagttacatgaaaaagagaaactatgtgaaattataggctttctcctagaatatccaaaatgctcatcaacagttaattagtacaagaaagatgaccaccaggtgattgaatagacagaatgtcatgtagtattttaaaaacacagattctgggactagaagctaccaccaaaatatccagaaatctgagttaacaggtcctttattttgcacacttgctgctgatatatagaaccacgaagtgtttgcacagaccacgaatgcagccgctagcctagaggctggtcacagaagagaatgcgatgaacaccgtcctgccagtgtgaggacggagtgtctgatgtgtttgtgtccccccaccacccccccatatacaaaggccatctctagggcagaaatctctcaacagctcaagcccatcctcgctgccccctccacgaaacgacacagctcaagcttggtgctgggaagtctttccsatgctggtttgattcctgatcacccaactggacagggccctctccaggacctcccaggttctccctggtaccttccctccctcaggaggaggcagcactgtctctgaagccaccaacgagtaatgctagaagaatcagaagaaggaagtatctgatgaaaaggcacctgcaagtctaaagtcctctttggtgagaacactgtacatccgctgaggcagagctttggagtagggagcagggcgcggcacagtggtgcgcaaaatgaattcccggccagcagggggtgggaagtctgacacggagttctgccttctttcctctggggagcccattctcttcaattcctcctctggtggagtcatagctgcagcctggaaaagaatcaaatgctaaagtcaaaagcaggtcaaatgctaaactcagatgcttttgaaggacagatgaattaacataataaagatatgaaaatgtcccacgttactcagtaatgcagtcagctatatgttaagattactcaaaaaccacataacacagcaaatgcaagaagcttgagacactgcatgagcagccgggctggagacagacaggagggatgatgactgccaggcaatctgctctgaagagagaaggccatatttacacatctgatgaaaaaggacctcggagctgtgctgctttctatgtttcttccagcaatgacccaagtctacgtctgacagcctcagtccagtaaggagctgtttttctccagagtgaaaagatgattttcatcttgactctgggtaagaattttttaatcgattctttttaaggttcacttgccaaattaaaagtgggggcattggtcttgcttgctgggcagytaatgtgatgccgaagtgatagaggcccatatagcaatgaccacaaaagagaagttcgcaatattaaaggcatctattttttcattgaaatgacataaaatgcatgttcatttacagcctacaattttaattctgattactgtactttttttaataccatcaatttgggaaaaaaaattgttttggcaatggaaacatgaaatcatgttgcgctaaacatcagcaaggtaggtaagccaaatccagactgtgagagaggtggttagtgttaatgaccttatgaaattagagggatgggaaggaacaaggaactatgaggggcaaaggctattttgttacctcatcagaagattcagtcagcttgagaaggggtaagaaaagaaacagtgatgaaagggaaacaagcaagatggtttaaatagggctagacaagggagttcaggattatttcaaagacagtatgcactacattatggaacatgatcctatcaaaagaatattcaagacaaagtcacaccaaacacagcacacccagctgtcaactacagcagacatctactactactcatgcatccatggctcaacaggtgacatatgatgtcatttaatgggagaaatgamcaacaaaaacctagctcttttactgggaattatgatgcaaaaaaaaaaaaaagtgttcatggcttgaaaaatagaatttaggaataggtgcctaacagttattcaatctagcaagtctgaagcgaaatccagtcagtcatttatttgctgaattccatttaagtatgtacataccagagatacctataatcatgataaggcttattactatttataattttaaagaaaagttataaatatatagaattactataagctataaaaacaccaagtgaaattacatcacaactttttaaaaaaatgtgttaaaatcttgactaattagtaaaattgatataaagtatcagctaatgaaaagttacatgaataaattctaacagtttacttcagccagacatttaaaactgagtttaaaaatgtaccaaccagatgcttgttatatgtattacacagtctaccaattccctaaaaacattcactacaaggtctgaaaactttaaaatcttttcttaaatgacataatgtagatggatgyacaatttcagtagccattaagggggttagctatacaatgaggctactgaaagatgatatactatgttcctgtatttagtgattttgaaagatatcttaagtatattaagtggaaaacaagaataatgaagtaattatataatataaccctacttttaaaattatatatacatatgtatatactagatgttaaatcatcaatgggtagtgagattatgtgattaatattttcttataattttctaggccaggtgtgatagctcacacacacctataatctcagcactttgggaggttaaggaaggagaattgcttgaaaccaggagttctagataagcctgggcaacaaagtgagaccccgtccctacaaaaaatataaaaattaactgggcgtggtggtgcatgcctgtggctccagcttcttgggaggttgaagcaagaggattgcttaaacctaggagttcaaggctgcagtgagttatgatcttgccactgtactccagcctggaccacagagtgagaccctctctttaaaaaatgaataaataaatataaaagttcctatattgtcaaagttttacttgcagtcagtagagggggtaaggaggttatttctattttggggaaaataattttgcttagttatctaaaataagtaacaatctcaggactaaaaatataaatacttcacattttaaatcctcttaacacataactttttttttttttttgagatggagttttatcacccaggccggagtgcagtggcatgatctcagctcactgtaacctctgcctctcgggttcaagtgattctcctgcctcagcctcccaagtagctgagattacaggtgctcaccaccacgcccagctaatttttgtatttttagtagagaaagggtttcaccacattggccaggctggtcttgaactcctgacctcaggtgatccacccacctcagcctcccaaagttacaggcgtgagccaccgcacccagccaacatgtcacttattaaaaatgatcaaagaggaaagaatttttgcaatatgaggaacattcatattggtagctaacaaggaaatgcgcttgtaagcttctgggtagtgaactggatagatattatcagatgtggaaccaaactcggttcttgttttcatgccagagagaaaaacaaaataaatcaaagcaagcatctattgtttgctagaagtctaatttataaggaaataaatatttggttattaatttgaaattctgaggtttagggagctgccccataaacaaactcagattttagctcttgctaagaattcctatcagtgtatttggctatgaatttgaatatattaactagttgtactccagaccaactctacagggattatccagttgttattccacgtgtagacacatagaaattctttttcttatttgtttctgaaaattacactctcaaaactgggtcattctagtgtaatcacagtgccatataaggggaagcgtgtaattagtgcacataacgcctttatcagaatccctaatattaatgagccctgaactgagaattatctgtaggatgccagagcccttagccagtaaccaagatacaatataattttaaaatctttactttcactactagaggtaatggttatgataatttttcaaactgggctttctttctgtgctgaaatctgtttccacagccctaaaaatctgaagttttcctcttcttttctaggaaacctcaaaggtagatctcctcaccattacaagaacaattatatttataattcaagctgagttgtgactccactttgccctacatggggtttaaagatggtaaaactgaactccattctcatttgaaagtacctgtgagtaaacattttttcccacagcacagcactggccattgctaactgactccctgccagcttctataacaatggattttggactcttctaatttttaaaatttaggtcctagaatatacttatcattttaattcaacatgtaagaaatcaaatggatttcgaagactcagaagtcattgtttcttcagtgttcaaacccaatgcccagacttacactcaggtgacatgagtgtgatcagccacgtgtgggaactaaaacagcctcttcccaagtagaggtttggagagattatgatgkagtcaataatgactctcacataccctctgggcattcacaaacagcttgtgaatgatcctgccagcatgtcctcttcctgcaccggtgactaacacttcaggctgctccagcaggcaactcacaaacctaggagacagagacaggcaatgaaagggtggaaagtgagctgtccaggccactgggcgtccatcctcccacaggagttttgtggacaaatcctcaagctgatactggctaaacccaacaaggttggagtgaaattttacagcaagataagattgacatttggaattattatcgacttaactgacaatcttcctgctttttcacctgtgctcataaaaaatgtttaaagcctatctctgtcaaagtgtaagaaaaaatattcagtctatttttttcagactagaagcttagaaaatgctacagttaataaaagatgaaaaaaaawttgtataatataaaccaagttatatttatccaataaaagcaatgatccatatttgtttttgttttttttaaggggtatgtgtctgtgtgtgcacgcacacgtgcacatatgcttaaaatacttgtgttgggcaaagtcgcaattgtaaactgtgccattagatgctggaaacactgaacttccaagtatgtcacagataacgtatggtggaactaacagagttgaaggcacaaagccaccaaacctgcaccacctgctcactaattcatactctactattttagaaacgagtcccttgattagagcttattcttctcatttaaaaggaagacattttcaagagcaaagcagtgtgggagaaaacttcacctaacaaaagacataaaattcaaacacaaacttgttaaaagacagcaaatgccttgccatacaatattaattatttagcatcaataatgccatttattatggaaaggctaatgaaaatttttaaatgatgacaaatttaagccactgaacaagctaatttgtgaacactttatcacacattaaaacaatattgtccttccaaataacatgggcaaaaaatgaacagggcctcacactgatctaagctccattggtaatggtgccgagtctcataaagagaatgccccaatcatttgcttcatctgagaaaagccatctggtcaatctttcaaaacataatcgcaaggcacataggatgtgcacctttgctatcacaaatcttgtttaaaataaacaactaggaacagtaagcagaaatggtttcagcacctgcaccctgtggtcaaggaatagtaacagctgaaaacaaagttttggggcagggtgagcaacacagttaacagctcctccacaagaaattccagacaccacatctccaagagcaaaccaaggaatccctagaaaaggaggctctgggagactgtttctaaaagtgggaagaatggaaacacctggtagagactcagaaatacgggagaggtcaaatgctatgataattatttctgtctctagacaatgcttgtttcaaataatatatgattaccacaaaagagtcttaatatcctattacaatttttcttaagagagtggtggcttttcctactgcagacaaaactgaattagccaaatagcaattacctttcaagatcttccttttcctcctcctgttcacatttctcagttccaaacttggcttttagtgaccgagctctggcaatgagagcttccacattagtaatctggtgaatgatttcctggcggtagaaaaggaagaggcatacattgcgagatggcaaaaaagcaaagccctttgaaaacgcatcttaaaaattatttttgccaactgaggagaacacttggcaagattctgacactacatcaaacttacttccaatttcttgtcttctggattgggraagtgcaaaactttactggaatgggatattatctgctttatgatcttcttaactgaagaaatgttttcgagactttctattttagaaaagattgaagccagcattaaataaattaagcaaaatatactttcactttggaaatgactaatgactagttaaatatgacatttaccttcttcctttaccttgagtacagctgcatgaatcacacaaggtaacaggtgccgagcaaggtctgcaggtttctggattgccagatagtgcagcacctgaaggaggtgcagcrcacacaaatgatcagcrcaggtgtcaaaggatgaagcagccacttacagaagtgcaaatcctcagccactcatcttaatccttaacaagacagcactccagataggcagccacgaccccaaaggtgaggataatgttactgaaagcacctaagaacttcaatctttaataattataaatattctatttttttctgctttcttatgtaatacacacaaataaggaaaatacaaagaaaataaaaactaccgactgattacaataccaagagaaaacaaccattgacagtggagcattttcattttaagacgcagaatacacgtactaagggcactaatattaaatatgtaaaatactgccttttaacctgcttttctcacttaatatttctaaacattgttagtgacttcccacacattttttggttttagttgttttggtttattttttttccaattcttattataagaatacagagaagtatgtacaaaacatggaccctacctttaggctccttattcaacagtaaagataaaagaagtataaccctataaatatgtacaattcttttacatcaataaaaattttaagaagtataatctcataatgtgagtctgactgataaatgctcatggatttcaaaattttaaaaaaaatacaggtgatgcagaaattttcctgaaatcctacttccccaaaaccacattttcgtgtttatcctctcaaactacttgtatgtccatttaaacacaaaaatgtagatgcatatgtaatttcttaacaaaaattaataacttacatactgttttattatttgctttatttaatgacttgtggtggacttttttttggcttagagagttttgtctgatttgaaactttttttaaattaagaaatatacatactagagtattagaaatagtttaaagaaaacaccagcttaggaaacagaatgttaccaggcttttccaagtcctcctgtgtaccctccatccccagaattaactacaaatcattcttttgcttttctttatggtttttttcacatatgtagccttaaataatatattgtttacttttgtctagttttaacctttatattaatggagtgtttctgtttatagccctcagtgacttgctttttttcattcagtattttgatattcgtataccattccaatatgctatagtttactcattttcactgctgtattaaaatgttcctacactaatagtagtggatagctcctcagtttttggctattacaaatgatgctcctattacattattgcacatatttcctggtgcaaatgggacatgtacagcaattactttaggatatatacctaacaattgaactaggaaatgtacaacataattatcctacaaagtgtttcaacagatttacattcttatctagagtaatgagttccctctgttgtacatccttgctaatacccacctttctgaattttgttttcccctgattcacagaaaaacaaatttgcaggaataacgtgaaatatgtgattcccctttacctggattcacgtatgacctgtctccctcctctgttctggatcccttgcatctttctctgctttcatgtgtgtacatactatagacataaacttgtttcgaataatttcagaataagtcgcacactcatgtcccttatcccaaaatatctgtatttcctaaaattaaaaatattttattatataatcaaaatgcaaatgattctgattatatacaataaatttaacactgataaaaataattgtaatctaacctactatctttattgcagttttgtcaactgatcccatatgtgkcttttttttttttttttttttttttttgagacagggtctttctctgttggcccagactggagtgcagtggtgcgatcttggctccccacaacctccgcctcccaggctcaagcgattctcctgcctcagcctcctgagtagctaagactacaggcacatggccactactgcccggccaatttttgtatttttagtaaagacggagtttcactatgttggccaggctggtctcgaactcctgacctcaaattatccacctacctcaacctcccaaagtgctgagattacaggcatgagccaccgcgcccggccgcaaaatgtgtcttttatgaccctttccctcaaccactacaagtcttggtaaggatcatccattgcctttagttatcatagctctttaatctcaactaatctgcaacagcttttcactctgtcttttataacattggcattttgagtatagtttcctcttcctccctactttttggctaactaaaattccatactgtattcagatttccttagtttctaaaaattgagttataactcacataccataaaattcaccactttaaaatggataacttcagtggtttttagcatatttgcaaggttatgttaccatcaccattatctaattccagaatattttctttcatctcccccaaaagaaacccagtaccccaaagcagccactcctgatttcccccattcctaatctccactgctgccaactactaatctaacttactgtctctatggacttgcctattctggtcctttcatataaatggaacgacgcaacatgcagcccattgttttctggctgctttcactgagcataatattttcaagattcacccatgttgtaacacatatcagtgcttcattcctttttatggctgaataatactccattgcatggacagaccatatttgtcttatctgttcatcactgacagacatttgggtttgttccattttttggctgtcatgaataatgctgtcagcatgtatgtatgtacgcggtttccttagtttttatctaatgtcattttcctgttccaggatccccttcaagataccacattatgtttagctgtcatgtttctaggctcccttggctgtgacatttctcaggttttcattgtttttactgaccttgacagttttgagttctggtcaagtatttcataaaaactccctcaattatggtttatctgatgttttcctcatgattaagctgggttatgtatttctgggaggaagaccagagaggtaaagtgccactgtcatcacatcatgtcaggagtacataccgccagtatggcttagcctgtggatgttaaccttcaccacctggctgagacagtgtcagtcgggctgctgcactgtaacatcactcctttcccctctctgtgcactgtactctctgggaggaacacactatgtgcagcacacacttacagagtgggaattagcttcacctccttgagggtggagtatctatatacatttagaattctgcacaggggatttgtcccttctatcccattaatttatatatccaatcaattatttataccagtatgaactcaaggatatttattttgtactctgagttacaatccaatattattttattttggtgttcaaattgttccagtcttggccagttgggaactctttcagttggctcctgtgtctttaatatgcccccaaacttctgcaaatttttcttttttcaaaatctttttaaaatagaatgttcctcattttgggttcatctaatgttccctcacaattagactaagattttacattcctgaaccaaatggcatgttaagtggtgttgggtccatcagagtatcatagcccaatgtgtacgatctccatttactcctcattggtgatgttaatttggagatactgtcctatttctccactttccttgcaatgcagaagcactctatagagaaacacttaaaaatcatgcaagatgatgctcttcaattttccmcctagacttaatattcatgattcttggtgaaccaatccttactatgaacatggttgcaaaatgaagacttccaactccaacatatcctctacatttaccactcatctttgctctgtaggaaatgacttcccctttcccctagttgtttatccattaattatcaatatggttccaagaattcctattttttccaacggtttataatcattcctgtccttaaatatttacaactcaaaattgtcccagatttggccaatgtgagtcctttcaagttagctctctatgaaatgcccccatctttttttaaagcacttccttagtgtcgagcaatccaggatgttccaggttcatcttgtaccttccttgcctcaatcttgaaatcagtcatttttctgaggaaagcatggttactaaatgtctaaaaaaaggaatgtgtaaaaaaaaatcaagctatgtgtgctcactgctatgagggtgtcagtgcttctagactctttcagaagaaagccagggaatgtttgcttgtgtatatacatatacacaaatagttactatgtccatacccacatacctatccatattttaaaaactcgtaagtccacaccaatacctccaattccaattcattgccactgcgttcttccttgccttcctttatttcatatttgcatctcacttccacagtaagaaattctggcttccaacaccaccaacatatttagttactcacttcacccaaccaataatacatctaaaagagtttcacaattgctgtacccgtatcattacaaaaaccaagcttagataataatagggttcaagattgtttttgtttttkktttttttttttgagatggattctcactctgtcacccaggctggagtgcagtgacrcgatctcggctcactgcaacctctgcctcccaggttcaagcaattctcctgcctcagcctcttgagtagctgggattacagacgtgtgctaccacccccagctaatttttgtatttttagtagagatggggtttcaccacattagtcaggctggtctcgaactcctgacctcaggtgatcttgcctcggcctctcaaagtgctaagattacaggcatgagccaccagcgcctggcctcaagatttttcttgcagtcccatcccccaccacaactgacagtatacagtcaaacacatttgatgtgtcgataaatcacttggattagattttccatcctcccttcaccaatccccgtcggtgtggttatgttactcatttaaaatacagctggattaatgtatctcaacttgctttcaggtttatttttcctctttccattcttgttatttttttggaataagtaaagcataggctagcacagtggctcacacttgtaatcccaacactttcggaagatgaggcaggagaattgcttcaggccaggagtttgagatcagcctgagcaacacagtgagatctaatctctataaaaaattaagaaaaataattagttgggcatcatggtgttcacctgtagtcctagctactagggaaactgggccaggagaatcacttgagcctaggagtttgagggctatctttctrttgttcaagtgtgtttttgaggagcgttttgttttcttcattaagatttcaaatattttctgttaagtattttactttccccttataatgaaaattatatttagatcttctaaatggttattagtgtatatgaatgctactgattactgtatgttaactatatatcatgctgccttcctggattcttttgtttttattagttttaacattgactttttgaatttttccaagtatagagtcataccactgcaaacagagttcttctttcaactcccatgcctctgctttctcttgctaattacactagctaatacctgcagaacaattttgattggcagtggagatgtcaggcatccttgctttgttcctgaccttagtgacccctaaggcttcccaaattaagatgctgtgtttaggactaaagtttctatatattttctgattttaaggaagtagccatctattccactcttttcccaagagttttaagttaaatttatcaaaagttttttcagcataaatagagatacaattttctacttaaatctattaaggaagcaaattatataaacagacttctaaataatcatcctcatatttgatcaacatgtattrttttcttaaratgatattagagtctgtttacttccgattttgcattaaatttcttaagtattactggtctgctatttttaaaaatatgctatctttaccaggtttaggtaccaatgttatagttgcttcacagagagaagttggaaaatttcctccaattattatgtgttgaaataatttatgtagcattggaactatatggtttcttgatatttagttgaatttccctgtgaaaccatctgggcctggttctttttaatgtggcagttccttgataattgtctctatgaaaatttgtctgtttayactttctgtttttactgggggtagttttgatatacattatatttttggtaggaatttccctaggaaattgtctaattcaacttgattttcaaatttacatacacagagatgtgcaaagtagtatttttaacacatttcctctgtatcagtagttactaatatgtgccctttttgtcatttattattttattatatatatgtgctctcccttttcttgattaaattagctaatggcttctctattttgttgattttaaaagaactagattgaactcattaatttcatctgttttgtgttctctacactctctccttttcatttgcttccttttgttttcttttgatttgactttttttctagggtttttagttaggaatttaattcatttattttcatccttttgtttttactgatacagggctatgaaagttcctttcatcaatttcttaagtatagcctataggttcatatgttttcatcctcattgtttttcaaaaattctgtactttcaatttgtattttcccctttcacccatattgtttaatagaaagtttgtattccactaattttctagcctgagtggtaggctataccatctgggtctatgtgagtacactctatgatgttcccatgataacaaaattgcctaatgaggagcttctcaaaacgtatcctctttgttaagccatagggactgtattagttctgtcttagtattctgatttttctccttaaaggaaactaatgaattgmatattctgacttttcttatctttcatttatactactttctcttcaattccttttactcctatatctcattttcattttctgggctcttttcccacttttcttcaatgccctttataaaatttaaacttgggcctcttgtaatttagtcttcattttttatatggttttcttttttcttttacttctatcctgagctaaatcagttgtggtttcatttctttgtggggttttttggtccatctctgttcttgattttagtatttctgattaaacatggttttttcatatcctccttaactgtttgaggatatctgattcagtttggaatgttatgttacaattttcttctgctttgtgactgattttctgggaaatattttcattacctgaaatgagctgatttgcattttctgttttgtaaagtagttttatatggatgtggtctgttctcttctattcctagtaatatcacaaatagcttcaaagtgccctcttctgaagtttctttaatggatagagggagatgagggaggctggttgtcttgtttttctttcatttccgcaagatccttaattttcccctcttatttcctttttctcatcattcccatccactccttctttgtatatctgattttctccaaggctccatttctagccctgtttacattcaagtcccttccctgtggcaagtgctgtgaactagcaaaccctacctgtgytcagtgttttggcatgtagtgttaggctctctctttctggggtgactttgtgtttcatctaagtcttctgtatctcttggctctttttcttttcctgccccctactcaatatatctgcaaagactgagagcagtgggagctccactggaatttggcttatttctctatttactgttaatttgaaggtcattgcaatttctatctcttagtaatgctgaatgcatggatttatttacttattgatttcacgggattttcttgggggggtggaggaggtaggaaggtgtgcagggcaattaaatatcaggcaggtgccactatattctccataactccaaatgttttttaatagctgctgtaaagctggccactaatggatataccataatttattgaaccaagtccctgttgttggaaactttggttgtttctactttttcacttaagaactttgttgaacatcatttatatacatagatctttgtatatttctcattatttccttaaaaaatgttttggtgatagaactgctagctcaaaggacatacccatttttaacacttttaacatatactgtgagacagttcaatggtaagcagtctgtttaaactatgcatgcctattatttgccctatttgcaactagttctagaatcttaaatgtgaatagtagatatataaaacgctcattgaatttcaatgctttgcacctcaagtgtgtccaaaactctcacgtctatgacagtgagttcctaaatcataagaacagtaatttgcattctagtattagagactcaaacctcaattaccttttctgcttcccgtgtatcatcraagagtctcctttgccttctagcaggaattggcttagctgtttcccaggcttctacccacatattgcttggaatcttcatccgggcactcagttctcctttcagcaccacattgcccttttcatcaatcacctcctcttcaatataatcccggggtgaataccacctcacaaaatcttccagggagcaacctggattagctgcctaaaataagacaaaaaaattcagcagaatcaaatgaaaatcaacagttactgataagcctgtttgcaaaattgtattttcaaaaaaagcctatctaatctttacaatctaatatgtaaaatgaatttggatgtcacctttaaaataggtcagatgttaaagtatcaaaagcattttatttttattttctcagctttatagaaaaagaaaacattttcatttaatgaatttggatataaaaactcgatgtaaagagaaaatcatttcttaaacacattatgtgttatataacttagtaatgaaaacactttcattcaatgaatttggatataaaaactcgatgtaaagagaaaatcatttccttaaacacattatgtgttacacagcttagtttcatattacagtataataactactcaatactaagaaaagtaaaaattaaataatacaccacatgatcagaataacacagtgatggaaaagttctgttcttcttttcctcaataaatcaatactggttctgcaataaatgtcagctaacctcaaaactgttctattctgccatcaaattcttgtactttatataacaaattaccatcaaattaattggttttgtgctgttaacgagttggaattcaaactactgtttttcaggcttctggaaccaaactgattaaagttttactcagtggatagttctatagaattaatgatgatgtatgccaaaaacctttcagtgattctaacttcaagcttggaaaaaaagacgaggcttcccagtgtttgtggtaaggcacagaggtctttctacaagtgttccagtgatgtactagtagagtcctaaggatgggcatgaaaactaccatgatgagaatgttctgtcttaaatgtgaagagtaaaactaccagtttctcctcactgagctcaagggctaccagcatgaccatccctaccatcttaggatatacccctaagggcatatcccctagaagatccttcactgactgtcaacaacacaaatgtaaaagggttatgatacggtccatggcaaaagcagtgggtcaagattatttcatgatactgggtgactcaggattcatgtacaaagatctagatcttaatcagttaacatcatacccacatgaaaacatcctaggaaaccagaggcccagagtaaagagcataaacttcaaaagaaaataatattcactcatacactatagattatattgaagaaaggcatttcataccaaaattcttctttctggttgtccttactatactaggctgaacatagctaccaagagaagrccaaggttcacttgagcttatcttctctttactgttaaaggtatgtaccacaagggcatgctccagaatccaccctctccttctggaactctgaggtgtaggtgtaggtgcccaggcacatattagtatgcttccaatgctctggggactctcaagagcccctaactcatccctatacaaaaagtaaaggcaaccatatctattttagaataactacatatttccttaaatgtattatctgatttctacatatgggtgtrtatgtaagttgactatttaaattactgtctattttctggttaaaacaatgtcatgtaagatttgcaggtacccaggttagcccaaaatagtctaatgaatcacagttttgctgaagtgcagtgttagaggaactatatagaactttaccaagaaggagtagtatgtttccatggggaaaaacttycgtagttcctatttggaatgtcctcccgtgcatgcctctgcaaagacactgcagcaggacagggaaagatgactctgaaggcagctagaggtcagatggaaaattactgctgcggaggctggtatttcctgctgtgcacacacaccttaagccaattcccttctctaccttttggtttgacatgtgccccaagagccaactggcttctctttatccactgtaccaactatttgttttaaagcaactcctctgtttcttgtcacatggcagtatagaacttgcagattttctgtatcattttagtctccaaggaaaacatatagctcttaagaggttcactaaagatgtttttcatttagaaaagatgggtaaaataagcaggaaacaaaaggctcccttttattgtcacttaaatctgctagcaaaaaaggatgaaagtggcataggtgtttgtggagtgtttatgtttaaaaataatacacaggtgtttcagagaaaaatcaaactcacactggcctaaacagtacagaagcaggactgagtaggggatatggattggcaaggtggaggccaccacaggttaaataaagagggaagtctgcgcctggggatagttcagagtatcagcagtaggaaaggaagccctgtagcccatggggctacccacttggggttttaacatatacgtggacttgcctttgctttcaaaaataaaagtcctttcttcattcctagtttttaagctaataagccaaatgtcaccattccctgaatcctgtatgttcgaaatacagacctgtatctaaccctaaaatattcttcagatagcaaatgcctactcatctgaaatagtgactcttctgagaaacctttcatgacctactcagcagagtcagtctttttgaccctgcctccataagagaactcatgacagttccttacatatctcctcccacaacctcaatcaactgtaactgagggtaaacactgtatttcttaactcatctagtcacagtgcaaggtacacaataggcactcaaaagttcattgagtgaagtgacccatgttaaatcctaagtttcctaaaagtcttccattaaattggctgaacacaaacaaagaaaccactccaattcacatatagaaatgattctattctcaactttcaactattaataatactagatctttgcttttttaaaacttaagaaacaagtttgactatgtcctctggggggatggtggcagagtgttgaactactaatgaaatccaaacacttaacaaaaagacattcaggcctttataccactttacagagtgattttcacagtttcatcccagaatagctcaaaatagaccccagagctctgcaagtgtgacccaccttaaaagactccatatctgagagcagacaggcactctgcatgcgtgctcgaaggtgagccccctctgcygatgtacctaatttagctaaaacttcagactgctcttctagcagatcttctgtcataggtgctggttcctgtgaagcacaaaaggacaaggctcataaacagccctttttagaaaaagaagtaccataaaaatagaataaagacaacagtcatttcagctrtagcagtcacaagatgagtatttttaaaaattcagagaaatgcataagttttttagaacttacataaaaaagaattaagaaaaataaataccactttcaggcctcctccccctcacagataagattaccatgtttcccttgacaaggattgatagtaaaagacagaggaatttgggtccactgagcaacattttcctgcctattagtgataaagaaatgaagtcctaatgatattattatatatgtcatcactagctgcaacaaaattttaattataagtaatagaaatggtttgatatagaaataattgctctaacagggccaggcacggtggctcatgcctgtaatcccagcactttgggaagccaaggcgggtggatcatgaggtcaggagatcgagaccatcctggctaacacggtgaaaccctgtctctactaaaaatacaaaaacaaaattagccaggcatggtggtgggcacctgtagtcccagctactcaggaggctgaggcaagagaatggcgtgaacccaggaggtggagcttgctgcaagccgagatcgagccactgcactccagcctgggcaacagagcgagactctgtctccaaaaaaaaattgctctaacaatgatcatctctggttataaaactatgagtttttattttttctctacaatgaacatgcatcacttttaattatcctgcaagtaccaagcaagaatctcacactgagatttagggttgaataacaacctgtaaygtagtattgtataatggttaagagcttgggctccagaaactatatgctatgtgcttgaatcccagctttgtgaccttgggcaatcactcaaccctcattgtgactcactgttgtgaagaacagatcctggcacatgctcgatagatactagcaattaaagataaaatacttaggttatattataggcttcatactttctctttgactaagggtcagtatacttctcaaaatatttcagtcaagttcacaaattatattcaatctctcatgaaggagtatactcaagagcagaggccttcattctttctattaagaaggggctacatttcattggcctacagccctgaaatcacaggatgggaaggaaggaaatagatactgagaggacactgactatctctcccacttggaaatttgagccacttataaatggagaagaacatgataaagaggagaataagcagcaagttgcatgtgggccatacattttcacatatactgtttctgaatatgcccaaagcattcttatattcatggacccatgggatcactgagaggggtaagggaattttgcaagtgatgaaaatgaggtgcagagataaagcgccttgcccaggatcaccaagtggcaaaactaccaagcagcaaacagaaaagagaatctaggacatcagtttaatgctgactttaagaattactagcttgaggctgggcgtgatggctcaagcctgtaatcccagcactttgggaggccgaggtggacggatcatttgaggtcaggagttcgagcccagcctggccaacatggcgaaaccccatctctacttaaaaaaaaaaaaaaaaaaaaaagatmcaaaaattagccaagcatggtgtacacctgtaatctcagctactcaggaggctgaggcaggagaatcgcttgaacccagaaggcagaggttgcagtaagccaagatcacgccactgcactcaggcctcggtaacagtgagaatcccgtcaccaaaaaaaaaaaaaaaaaaaaagaattactagcttggttccaatccactgggtaaggacattttcttctagccctggctctagtatattggggtaaagtcttcaaactttttctagccatgtattttatgttgtgacctaagtctacataaatggaacacagaagtatgttcgaattcttatgaagcaactatataaagtcattatttttcagtgaagaggcaactgattaatggcacattttgagctaacttctaaagcttgaaattacattggtttcaactgggatcattttgaattccaaccatttcatataagtacacttataatgatcataattcaaataaaattaaccttaaaataagaaagtaaaatggactaaaattttgcctagatttacctaaaggcaaaatataaaaattaatttctaaatacataagatgcacactgaaagaagagtaagtcagtccagatttagactataaattcaaatgtgaaaattcaagcatctgaaatgagagagggagcacagccttttgaagaaaaataaagcactaaatttaaaaagtattatttttatttcaggaaagaagaagcctgagcttccaaaataactttttcagactgtttattaacccagtcaaaccaagaaaacaaatgtacaattagcttattaaaaatagggactccaatatgggcaacaaagcaagaccctgtctctacaaaaaattaaataagtagctgggcatggtcgtgggcgccaataattctagctactcaggaagctgaggtgggaggaccgcttgagcctgggagattgaggctgcagtgagctatgattgagtgcacttcagcctgggcaacagagtgagaccccgagtcaaaaaaaaaagggggggggaggggactactattaattaaaatctggaaggagaaaggatacaaaaaaattaacttttgctgaacacttacatgccaagtgttttcgaatatgatatgtgacttaatcctgaacaaactagagtaatacaaactattattgctttttaagaattcagtatttatttatttattaaacagataaggaaatagggttttaaaactgcagaagtgttagaacaagatagaaactttcatttttcctttgttaaaagattttttttttttttttgagacagagtctcactctgtcatccaggctgaagtgcagcggtgcgatctcagctcactgtaaccttcacctcctgggttcaagcaattctcatgcctcagcctccccagttgctggggctacagacatgcaccaccatgcccagctaatttttgtatttttagtacagacagggtttcgtcatggtggccaggctcgtcttggactcctgacctcaggtgatccacctgcctcggcctctcagagtrctaggattwcaggcgtgagcgacctcacccagccctaaacaactttttagaagtagaatcaacatacaataatttaaaggcacatttgataaattttcgtgtgtgtgtgtgtgtgtgtgtgtgtgtttatacccccttgaaataatcacataatcaacatactgaatgtattcatcacctcagaaatttccttatgcccattatttttggaatgtttatcaagagtgaatggataaacaaacttgtatatccatgcaagggaatacgactaaacctaaaaatgtgcatgaactattgatacatacaatacgtgtgaatctcaagataattatgctgaaagaatgcacacaaaaaatgttattccatttgcataaaattctagaatgcgcaaattaatctattactgttttttaagatgagaaaaacaaggctcagaaaggaaacatagcttgtattagcaatgctgttaataaatggtgatgcaggatattaatccagttctgctacatcctaaaacccaggtctatacaagacctcaataccaactgcattcgccatagcaagattagaacaaatattcatttggagtcaggggcggtggctcaagcctgtaatcccagcagtttgggaggcctaggcgagcagatcacttgaggtcaggagttcaagaccagcctgaccaaaatggtgaaatcccatttctattaaaaatacaaaaattagtcaggcttagtggcgggcacctgtaatcccagctactcaggaggctgaggcacaagaatcacttgaactcagcaggcagaagttgcagtgagacaagatcatgatcgcaccactgcactccagccctgggtgacagagcaagaccttgtctcaaaaaaaaaaaaaaaaaaaaaargaacaaatatgcacttatacacttggtttctagcattaaaagattctgttctaatactaaaatttaatcatgagaaacctaaactctgacttacttttaaaaaggtataataaagcaaatagcatatgggctatcaaaaacaaaacaaaaaccaaagctagtaaattatgcctggtaaataaagaatataggcatggataataaagttaacagaatccatgtttcaaattattatttatttcactatacctggtactttattaaaattcatgactattaaagcatattatcacataccacacaaaatccaagttgagggctagaacagaaagcacacaactccttgtacaaatattataattcatcaacccatttcagaatataaagactagttgcaaaaactaagtaatccttgcatcttgacgggcaataatagccacttatataagaaaatgttccagaagaataatagctaaaatttaagtgtttattttgaattagacattatgttaatcactcatcaggtactatttcatttaaatgatgttaagaagtactatgaacttatagttgaaaaaactaaggcaaagaaagattaaataatgaccccaatccatacatatgctaaatggtagaaatggaatttgaactcaggcaatctaactccactgacagtattcctaactatcatgctgtgactccttataggtttggtaggcttaaagcaaacgaaataaaaactacataaaattagaataattactagaggttaagaagtgtgtgtgtgtgtgtgtgtgtrtrtgtgtgtgtgtgttggtgaggggtggtatgaagagaggttagctaatggatacaaacagatagaaggaataagttctaatgttcaatagtaaagtagggtaactatggttaacaacaatgtattgtgtgttgcaaaataacttaggagaaaaaatttgaaatgttcctaactcataaaaatgataaataagtgacagatttatcaatcacctatcaaggcgattgatactccaaacaccctgacttgatcattacgctttctatgcatgtaacaaaatagcatatgtaccccataaaaatgtacaaatattatgtaccaataagcaaattttaaagaataaataccaaaaatattaagcaaaactctgttagtattgacttagcaaatggcaaataaaccactgttactctacaatagcacattttctaaaagaaagttcaggataataactttatttcatcaacagtaatttgtcagtacaaccatcttgtgtgcaatggcaaattaagactctgtaagaggaaactggaaagttcagaggcaagagagaataccgcatttacaacacaagaaccattttctttacaagaaaagaatcatttttaggacttggaaatgaaagtgtgataaatcccccaaaacaaggaaacacaaaacacaaatggcaaatggaataaacaaaagttgtcaaaagattctcccataatgctactgacagtggcagcaaaaagtcaaatgcctaggcagrtaagaggcaggtcctcagtgaaatctgaccttcaaacaaagatagttkaaagcctgaaagccatggtacaagttctgggtaaatccacagactggattgagaaactctcttcctacttggcatgctttcctctgagtaatcctcacccttcacctatttacatacacctatccttccctacttggttttatacattgtcatgcccccctttgagtggtgcctttgttttagcccattttgcgtactcgcaaaccaatcagcaagcactccccattctgagcccataaaagctctggacccagccatacttagagagaaaccacccgacttcaggtgggagaccaccctcgcagccccttttggctgagagctgtttctgtcactcaataaaattcttctccaccttccttaccctttgattgtcaacgtaaattcattcttcttggatgtgggacaagaactcgggacccactgaatgtgggtacaagctgtaacacaagtgggttagggcacgcttgagttagggcatgctcagcccagctgagagctaagctggtgcacaagcctggcggacagagcacctcctgcggcaggcccagggctgagtgaggcctgggcagaagcattgccagccacagagggccccagcgggcaaagtggccaagaaaattcctgtgtcactatgcaaaaagataaaatgtatgaacaaacagtgaagaggcaagagttaagagaacatattcaggaattatgacatctgagtcccaaattaaggagactgcttaaaatgtaacatgttagggccggacacagtggctcacgcctgtaatcccagcactttgggaggccgaggcgggcgggtcaggagatcgagaccatcctggctaacatggtgaaaccccgtctctactaaaaatacaaaaaattagccaggcgtggtggtgggcacctgtagtcccagctactcaggaggctgaggcaggacaatggcatgaacctgggaagcggagcttgcagtgagccgagatcgcaccactgcactccagcctgggggacagagcaagactccgtctcaaaaaaaaaaaaaaaaaaagtagcatgttacagaagaaaggttgaatatcaattacctatgctgctaataaaacaagttagaaaaatagcagattagttctaaggaaagtagaagcaaagaaataatagaagaaatcaatgaaatagaaaacaaaatcaacagagaaaaatcaacaaaacccaaagttgttttttcaggggaaagattcataaaattaataaaaccctcttatagatcaggaacaaaagagataatataccaaatgccaattttaaaaattaaaactgcaatatcattatagattctataatcactaaaaagattataaaagaatactatgaaataatttatgccagtaaatataaaatttagaaaaataaaaaattacttgaaaaacactatttgccaaagttgatmcaagaaataaaaaataagaatagttttttatctattaaagaaatctaatttaaaagtaagtctatatttgaaaatatttctacaaacaaaacttcagattctgagtggtttcactggtgaatatgttcaacatttgaagaagaagtaaaatcttatttatacaaatttgtccagagaagagaaaaagaggggacacttccctgacaaggacaacataataaaggtcaatacctctgacatatgaatataaaaatcctaaaaaaaaaaaaaataaactccagctgtataaaaagggaaagcccaagtgggatatataccaggaatgtaaggatgttttaatactcaaaaatcaatcaatgcaattaaccacattaatggaataagggagaataaaataggattaccttaatatacaggaaaacatttgataaaatgcaatacctgttcatgattaaaaaaaaaacaaaaaacaaaactctaagcaaactaggaatggaacttccttaataygataagtgatatctacatcaggtgccttcaatgactatcatatgctttctttctgaggttgggaacaagagaataatgtccagtattcaacactgtactggaggtcctagccactgcaataagataagaaaagtaattcaaaagcataaagattgcaaaatcagaattcaaatcatctttactaaaagacgacatgattgtgtatgtagaaaactccaaataatctctaaactactaataagtcaatgtagcaagattgttatatccaaggtcaatatataaaaatcaactgtttatatctatcaagggaaaaaaattggaaaatgaacttttaaaataccatttataaaaccatttaagaaattacaaataccttggaaatatatctaatgaaagatatgtaagacctctacattgaaaactaaaacactaatgagataaatgaacagaaactttaaataaaattgaagatatttaatggactcaatattaagatgtcaattctccataaattgatctacaaattcaatgcaatctgaattaaaatcccagcaagattttgaatatgtgtttgtttataaaaattaacaagctgattctcaaattgatataacaatgcaaaggacctagaatagctaagataatgttgaagagtaacaaagttagaagatttacactaccagatagacttattataaagctacaataatgatgacagtacattactggcacacgacagagaccaacggaacagaataaatagtccagaaatagaccaaaacacatacagttgcttgatttacatcaaagatatcactgccactcaatgggaaaaggcagatcttttcaacagtggtggtggaacaattcaatctccctatagagaaaagagaatcttaacctgttcctcttaccaaacaattaatttgaggtgggtcacaaacaaatgatataggtaaaacaataaagcttccaaaagaaaagaaaatatcttcagtacttggtaaagagttcttaagcagaacacaaaaagcactaaccacataagaaaaacaaggatagatgagactgtattaaaattaagaacacctcttcaacccaaggcatcattaagaaagtgaacaggccaggcgcggtggctcacacctrtaatcccagcactttgggaggcccagacaggcagatcacgaggtcaggagttcgagaccagcctggccaacatagtgaaaccccatctctactaaaaatacaaaaaattagccaggtatggtggcacactcctgtagtcccagctactcgggaggctgaggcaggagaatcgcttgaacccggaagactcaggctgcagtgagccgagaccacaccactgcactccagcctggatgacagagtgagactgtctcaaaaaaaaaaaaaaaagaagtaagtgaatagataagcaacaaaatatttgcaatacaagtatctaaggactcatatccagaatatatgaagaattcctataaagtaataagaaaaaaaaagacaactgctttaagaaaaaaataggcaaaggccttgaacaggcttttcaccaagaagatagacaaatgggcaataaatatatatatgcttcaggaaaatgtaaaaccacaagatcctacctcctacccttcagaaaggcaaaaattaaaatgaccaaaaatatcaagtgtgcagaaaagagttaatattgcaggtctgagactgccattcttagaaaggcctgcttgaaagttggcccttggctggcagctgagaacctggattttgagaaggttcccaccattcccagaactgataaaaatgactcactatgcctaaacactttgtgcaaataatatggtttatgctaaacacctactttctttatgggagtctagattttggtatggttaaccctatgcctaagcaaaggatgcctacttgaccagcccctactgataactcccactgctgtgcctctaacaagcttcccagggaagacaacatttcacacatgtggtcacaatttgttgcaacaggaattaagtgcactctgtgtaactacagtaggggaagctttttggaagcttaaacctcatctctttcaaacttcatcccatgtgccttttctctttgctgatcttcttgtaataaattatagccacgagcatgattatgggctaagtcttatragtcttcctagaaaatcactaaacctgggagtggtcttgagaacacatcaaatggggaggattctgtagaataactatactactataaattgttggtgagaaggttaactagttcaaccacttagacagactatttagatagatctactaaagccaaaacatatttgcaccatatagcccaataactctactcttaggaatatatccaaaagaaaatgagtgcctttgtctaccaaaagaaacaagaatgttcacagcagctttattcatattagcccaaagtgaaaacaacccaaatacccatcaacgggtgaatggataaacaaattgtgacaaattcatagaatagaatactaataacacatgcacaaacactgaagcctgcaacaacaaggatgactctcaaaatcggtaaataaaaaagctcaatggtatataatgtatgattatacaacgaaagagtacacaatgtatgattacatttatatacaaaagagtaagcaaagcatgccatttaaaaggttcaaaaactgacaaagctaacctatggtgacaaaagttaagagaaagagttgctggaggggaatcctgggcttcactatccaatacatctggctatttaatttaaataaattaaaattaaaaatttaattccttagaaacattagccacatttcaagcactcagtagttacatttggataatggctattgtattgaatgggaaagacagagaatgtagagaatttccatcttcacagaaagttttatttatcagcactgttctaggatgatgggaattttctgtatcttgatctgggaagtagttatatgcatgtatcaatatgaaaaaattcaccaagcagtatactaaagatttgtgcactttttattttttttttttttaatttttgagacagggtcttgctctgttgcccaggctggagtgcaatggtgcaatcatagttcactgcaacctctgcctcccggacccaagccatcctcccacctgagcctcccaagtagctgggtctacagycatacaccaccacgctcggctaatttctgtattttttgtagagacggggttttgtcatgttcctcaggctggtcttgaacttttgagcttaagcaatctgcccaccttggcctcccaaagtgctgggattacaggcatgagctaccatgcccagccaagatctgtacactttattgtattaagttataactcaataattaagtaaatacatgaacatatgtttttaaaatgactagcagaaaacatatacaatatatataactgtagattcacatctaaaatatgaagaattcatatgaatcaataagaacaggggagcaacctaaaagaaaaatcataggcgattcacaggaaaggacggctaacgaacatattaaaagatgctcaggttcatgaaaattcagaaaaatacaatctaaaacactgagatactacttttgaccatcatgttaacaaaaatttatatggttggtaataccaattgtttataagaaattgaggctgggcacagtggctcatgcctataatcccagcactttgggaggccgaaacaraggattgcttgaggtcaggagtttaggaccagcttgggcaacatagcaagactccatctttacaaaaattttaaaagtgaaaaaatcagcctggcatggtggtgagcacttgtagtcccagctacctaggaggctaaggtcagaggatcacttgagcccagcaagtcaaggctgcagtgagccatgatcatgccactgcattccagcctatgcaacagaatgagatcctgtctccaaaaaaaaaaaaaaatccataaaaccatgtattaatatgtacacacatatatgtattatacatcaatgcagagaaacagttataagaaatataacccaaaccaataatacttgttagttacttcaaggaatgcaagtcaaaattagtggatggtggctttcactttttatttttttgagacagggtcttgctctgttgcccaggctggagaacagtgacacaatcatagctcactgcagccttaacctcccgggctcaattgattcttctacctcagcctcccgagtagctgggactacaggtgtacgctaccccastcggctaatttttttttttttttttttggtagaaatagggtttaccatgttgcccaggctggtcttgaaytcctgggctcaagcaatccaaccccacctcggcctcccaaagtgttgggattacaggcgttgagcctctttcatttttactagattacaattttcacaatagaatgttttcaggccgggtgcagtggatcatgtctgtaatcctagcactttgggaggctgaggcaggcagatggcttgagttcaggaatttaagacaagcctggacaacagggcaaaaccccacctctataaaaaccacgaaaaattagccaggcatggtggcatgcacctgtagttccagctacttgagaagctgcggtgggaggatcacttgatcccaggaggtcaaggctgcagtaagctacagtcatgccactgcactcccacctgggtgacaaagagagactctgtgtcaaaaaaaaaacaacaaaaaaaaaacaaaacaaaacccttaaaaacaactattgctgctgttgttgttgagttattgctgttctacatcctaatggtgtatatgacttcaaactatttttgaacagataaaagctaatcatataattgaaggatatttacttttgttctctctatatatttttggattttttctttttctttaagtcaataaatttttgttcaagtaattccatgttgtgatttcttccactgtccatcaaggtcacttcagatcctctaaagagctggagtcaaaagatttatcttcaagttagccctttttaatgaaactgatgcttattttaatccagctgtcctgttagcccataattcttttattttggcttctgtcatctccttttaatatggatatactgatgaagacttcaaaattcaccaagaatctttgggatctaacttcttcaaccaatttactttagggtcctttttactgtaggtggtggatctgcctggttctcaatttgacaccctaagmgatcatactcaagaatagtacagatgtgtggaatacgccaayacctttaactacagacatcatgttctcaagataaaagcctttaaaacaaaaagccatcgtaggtatcaagtcaacatgaaattggaatgcaaaattaatactgctgaggatttccttcatatcccatgctgtttaactatctcttccacagtcctagaatcaatctttttwaattaagagacagggtctgtctttgttacccaggctggagtacagtggtgtcatcaaagctcagtgcagcctccaactcctgggctcaatactcttgcctcagcctcctcttcctgagtagctgcaactacagacacatgccccaatactcagctaatttttaaatttttgtggagatgaggtgtttgttactttcttatacaggctggtcttgaactcctggcttcaagcaatactcccaccttggtgtggggcttgcaggcttgagccattgtgcctggtctgggaccaacctttatggctatcaatattcccatcagttaactgtctcaggtatcataatatcccttcttatatgtatcaaaactcatactgaacaatgagttctgggttgcaaaagaggatttattttttgcacctatccataagtctttgtccacaagttaaacaaaaacatacataagtgcagttggattttcttttttaaacatctgagcattcactgctcagtttataaatcaccttatatatgatgacgtgatctacttaaacttcaaaacatttctcaattacagaaatggcaaacctaaaagccccaaaagtttatttagatttctttaatctttaaacatagactttgtccaatcttttaaaggtccttgattaaatcaagaccacatttatctatgtcattgggaaatccttacctttagtttctttaaacagtctatatctttatctttaaacataaacactttttttttcttttgagacaagagtcttgctctgttgcccaggctggagtgcagtggygcaatctcggctcactgcaacctcccactgctgggttcaaatgattctcctgcctcagcctccccagtagctggaactacaggtgtgcgccactgtgcccagctaatttttgtacttttagtagagacagggtttcaccatgttggccagacttatcttgaactcctgacctcaggtgatctgcccacctcagcctcccaaagtgctgggattacaggcgtaagccaccgcatctggcctaaacatagactttttggataattttccttactcaaagcactatcttctactaggatgaagttatataaaccacaaaataaattaaaatggaaagaactagtgcatcctacctgggttactggaatgtagagaggttctccattatgcagcagtgtaagtttcccatgctgatagagccgtccttccggccttaaatttgccatctccttaggtcctcctttcttgccactctcttgtccayttcctttaagttcttcagtatcacttaggcattcaaaaaattcttcttcgctgtcactccaggaatcccaagattttcctacctctcccttttccttatctgtttcttttagattatctggcaccaactggtctcctgcttttccagcatcccctggatatatattagtgacatctgaagcacttgtctttttcccctcatcacgtgccttctttctttcaatacaacaatttaacatcttaagaaaagagaaataacatttatagttgaattagttacagaaaaataaaaatctacctactgcttgaatatttaattttcactctccacttctcaggaccttgtgaattgcagtgactactgactatrggcaacctacagcagcaccatgagaacagcatgtaacccattattacatttagtattagaataatctgattaaatcaagaccacatttatccatgtcattgagaaatctttacctgtagtttctgatgcagtaaacaacacctcagatctgggggtccacttgctaatctatcaaataaagtaaggagaaaagaaagcttagttttagtaaaattgcttcagatatgattattttctatactaccataatttttagctatattgataagaaatcaaaactagatttccacaggtaaggtaagtgaattccagaggggragcacatagaattaaaagatgaaaatttattttatactccttgtccacaaatcaccaatagcaaatataatagatatttcaaaacataacagcaaattagtgatagttttcaggctaacaaaaactcaaaatgagaaaaagcccctgaacccactccaggaagtactagcatacagtatttcacaccatacaaaataaatcagtttgtgtattcagtactaaattcttacagtggattctcactataaaaaccaagatctccacctgtatttcaataggaccttggactgtctctagttctaggttcctctagactactaggttcccagcaatcagccagaggcactccctcatattcaacatgcttctgggtctgtaaaatgttccagagcggactgtctaaaaccaagagagaatccagctaagcagagattggcaaatgatataaatgtttttggatcagtaatcattttatattgctcaaaatcatgattctcctatcatagcatgggtagatgagcactaaactatgcaatatcaacctatgtgctaatgaaaatgttctgtttgattaagtaaaatgtcaattacaaaaaacaggtttattacaaaagactttgaaaatgcataaaagtataaagaacaaaataaaagtataatttcacactgggaaaaactgatagcatttcacagtatttataatatttttcctgtacaaatatagcaacataattaaaagtactttgtatatgcattaaaatattctactttattagaaacaatatgaacatctgttattaaagattattgggggaaaaactgtaatcaatctaattttctattgtagagatacagtataatttatttaactattcttttatgtttgatatttaggttttgcctttttttctattatattaataaatttgctgcagtgaacacctctgaacataaatcatgtctaagcttcttgccactttcttagggcagacttcctagaagggggaaaaaataggtcaaaagtcaaatgtctgctaacaaacaaaatcgtatccaaacaattgaaaattgaaattattaccctggaatcagaaagttgttttcccatcggaaacgcatttcaagaacaaattcctgccagaggtgtgccactcctttcaaccctccatggtaaaaattgatcatacagagacacaaagccagtttgtatgttaaactgtcagatggtgcagacttgaactgattgtagagattctaaatttaacaaaatagaaacaaagcaaacttgttaccaaaatattttacacatataactgaaaaggtcgtagggagagattttaattgtaaaattaacctatcccacctaaactaggcattatcaaatgtctaatacactactgcataaactattcttaggaagtcccacattttcaagatttctactaagattaaaaaagataaagctatagtttaatgaagctaaagttacagctttcaatttcttctgtggaatatttaggaagtattccaaatttcatgtgttgttttaaaaatcttttaattacaaaaatgagcacgtctgaaaaaacaaaaatcataactatctaaactgaaaatgtaaaaagcctttgcttttttctctcacctcatcaaatctacttctcaacaataactactgtaaaggttgatatatatctacacttgtcatttaaattcttcaacttcttaatttttcaaagactagacaaagagaccatgaaaattttacctaattttacacattttacttcattaaagagttgtccattcactaactagttttaaaatatcaaaaagaatctgctgagaaacacaaatttaatgatttcaccaaaactctacaatgagggaaatcctacagctgtgtagagtatatttgtgctattttttcattgtttccagaaaaattcttgctacccaaaatatgtatctgtgctagttatctaagtggaaaccacgatctgccatccaaaattcccaaggtgatttttaaaataaaaatatagtaagctattaaactagaaatatatagaacctstagaaattyagtgcatttaaaacattttaacattgaactccacatcaacttacatagtcttcactctctgatggaggattattattatctgttgaagtagttccatctaatggtttctcagaaacagcatcagggaataagaacttgaaggaaaggaaaaaaataatcacattttagaccacatttcctattttgttgatttttataactcatatagacattatttaactttttaatggttttgctgctctaacaatagaaatgttccagttgtattggccagtttgttctacactctcaaattttttctatttttctttgaaaatatacaaggtttcagtgactagccaattttagaaattagaatttttttcttaaaagtaatcrcttgattctgtaagctgaaaggtgcaaaagcaaaatctcatcactgtgacttcatgctcacccaaggccattacatttttttagtgttactactatctaaaaaacaaaaccacaaaagacaatttaaaaacactcatgtactcatgaggatctgaagagttacatcatccacaggctttcatatatagactactaagagatgatattcaagacccacagctttattttatgatacccctggaaagtaggaagcagtctaaacctataataaccaatgtaccttttccatgtggtttctgtttatatgtacatgtacgagtggtcaaaaaaaaatccagtgtacatgacaactgagctacatgatttgaataacattcttttaagaatacagtcttaagaaggaggctctctatagacatttatttacagtccttttatcactgttcctctcaattgttttgtggtactgctgattagtaatccctcttactatgtatactttgccacacattatagaacatgtccaatagacttttaaaaattagatgaactactatgtgccaagtgccataaggcacaattaccagcattatcctattctcatacaactgtttgagctaagtatcactacctacatcttacgatgtacaagctaaaaagttggctaagagttttgttcagataaatggcaggggataagattaacattaagtttccagttttcttttcaacacttttcttgaaggtttttcccaagattgtcttaatgcacaaatttccgggagtatgattttaaccacaattacagttaagaatagctatcatttatcaaagacccatatatgccaggcagtgtcacagaagatcctttaatcctcacaacaatctcgcaaggttttgttagccatattttctagatgaggaaactgaagtgacttattcaaagtcatgcagtaagtcatgcagacattaaaccatggtgtggatggcccccaggctggggccattccactctgttatacctaggagccaccttagctctctattcatctccctctcattctcactaaaagctttctctcaactgttgtcaaagcaatccttcaaaaatatacttccggggccaggtgcggtggctcacgcctgtaatcccagcagtttgggaggccgaggcgggcggattacgaggtcaggagatcgagaccatcctggctaacacggtgaaaccctatctctactaaaaaaaaatacaaaaaaattagccaggcatggtggcacgtgactgtagtcccagctactagggaggctgaggcaggagaattgcttgaacccaggaggtggaggttgcagtgagccgagatgcaccactgcactccagtctgggtgacagagcgagacttcgtctcaaaaaaaataaataaataaaataaaaaataaaaaaattctaatcatgttgatcttctacttaaactgcaagataaaagccagtgcttcagcatggcaggttacctgctacttctccagcctcaaccctggtcatggtctgggaagcaccctacaaaatatcaaccgttcaacatgctctcgaacctctgctattcctctgcttctaaagccttcttttcatcaagattcagctcaaatgtccctcttcatgaagccttccctgattcccactgcccagacagagacaaatgcacccctgctgtgctctcacagcccccttgccagatt

SEQ ID NO: 9857 - DNA, 12308 bp, Homo sapiens
  misc_feature (4207)..(4207): n is a, c, g, or t
acagtatttgcacagttttctcatcctccagggggacccaaaattttttgtgggcaagaactgtgtcttacatttttagtgcaccacaagctaaaaagaaaaatcatgggtttgggagacacagatatccgggttcaaataatggctcygtcagttagtggccctaaccaagtcattcccattttctgagccttagttgtctcatagcgaatggaatcatatctatactttaaagggttattgtgaggatccagtgagattataacagtgaagaacttaacagaagtaaattttcaacaagctttaaatgttgaatgtaaataaaatttccctttcatatattattcttctgttatagacactgaaacagtttyttgtgttttgttttttttttgagacagagtcttgctctatcacccaggctggagtgcagtcacatgatcttggctcactactacttccgccatccaggctccagtgattctcctgtctcctcagcttcccaagtagctgggattacaaaacatgcaccatggccaggctggtcttgaattcatgacctcaagtgatctgcctgccacggcccaccaaagtgctgggattacaggcataagccatggttcccagccactgaaatagtctcactttgaccctgaggagtaatcatttgatttttaaaactgagacatggcaatgtgcaaggaagttccaagraaactataccaagacagaaacagcaggaggaggagaagaaggaggaagaagaagggaaggagctcaaagaggaagatttgctttgcttctctactccactgttaagccaccaagacaccacagtttttaatactactagacattgttcctggaaagtcataaaatatccagataaaaggaggcaaggcctctgaggctaggataagcctttcctggayaagctgagccagtgcagtgacaacttaaatatatgcttcatcatatgcagccttaacttctagcataaggtgaaaatcagggatggataaagccttcctcaaaatcccttagaagccaccatgtcatttctcagcaagctcaacacaaacagtccttctgtggatctaactatggccaggcacccggtgaaatgggtggctttcacagggaggctatgttgtacagaaaatgaagatctttataagctcttacccttgtgccaagacgctgtcactctgagaagcatggtagaaacagcacattcacatctgcagtgtcccactcactcacggactttattctctcaaaatgaaatgatgggtacagccaccccgaggtgtgaattctgattttcctccctacctcccccmacccccagcactttttattttttacagagcccataaaattgaattcacataaaatagacatgaatcgggagcatggtacaaccactgttgtcaaaaattggaatcacatgatgccactgtccataataccatcttgcttaaaacaaaatgtttgaatttcttatctgccattattacctttatttatttgaacaaaaacatttatgtgcacctgcagaggttctgatatggtctttacatcccctattctctaagaggaaaaaaatgaatatcacctagaagcccagctagaagaagttactgatatatgatatgtgtctacatataataagaaaacaagaaaatactcaaaacacctcagggcaggaaaatagtaataattataatctattattaataaatataaatattaaaatattaatgatagatttcctgactgaagcaacacatgttaaagaattatattgttgagccagacgtggtggctcatgcctgtaatcccagaactttggaaggctgaggcgggtggattgcctgaggtcaggagttcgagaccagcctggcctacttagtgaaaccccatctctactaaaaatacaaaaaattagctgggcatggtggcaggtgcctgtaatcccagctactatggaggctgaggcaggagaatcacttgaacctgggaggtggaagttgcagtgatctgagatcacaccattgcactccagcctgggcaagaagagtgaaactccatctcaaaaaaaaaaaaaagaattacattgtcaaagcttccaccatttggttaatattgctacagatatgttctacctagatgaatatcttaagaaaaataacagacaaacaacaggaaaccttgatgaagctctttttgttttaaatgctgaagtttctgagcataacctgaaatgaaagaattaggaaaaatttgctcagttgttctgaataataaatcatatggaattttggatttatcttgcataggcaacacagatagtggatgtgaggggccctggaggtggcagaagcaagaataagagccccaagtctggacagagcaggggtgcagggatagggaagttcctggtatagcctaaggagaaagaaatccctcctattaggaagaacccacggacttcaggagagcagcatccgataatgttacattccaattttcccaaaccttcaaaaaaaaaaaaaaaaacctcttacatgccatagacttgttcacagacttaataattttaaaatgcaaagtttaactgactatattttatatagatttaatattgtatatataaagatttatatattgtatatagattttatattgtttatatttagattgtatatatataaatatatacaatatatagatgtatagtatatatcgatatataccatatatacgatatatcgtatatatggcacatatagatgtatacgatatatcatatatatggyacatatagatgtatacgatatatcgtatatatggtacatatagatgtatacgatatatcgtatatatggtacatatagatgtatacgatatatcgtatatatggtacatatagatgtatacgatatatactatagattgtatatatagatatatactatatatagatagatgtgtagtatatatagatatatactatatacatactatatatagatatatactatatacatactatatatagatatatactatatacatactatatatagatatatactatatacatactatatatagatatatactatatacatactatatatagatatatactatatacatactatatatagtatatatctatatatctatatatgtatatatatctatatatatctatatatagtatatatagatagatagtatatctacatagtatatatatactctatagagtatatatatactatatatactatactatatatactatctatgtatatatatctatatatactmtatatcgatatatagtatatattgatatgtactatatatcgatatatagtacatatcgatatatactatatacaggtattgctatccacatgtaaataagttaactatgaggtaactatgaggtaactatagtaactatgaggtaactatagttaactatgtaaataagttaactattttatattgttatccacatgtaaataagttaactatgaggtatcaaatgagcaaagagtttaataaactgtaatgagcaaagagtttaacaaatagtttaataaatgtttaataaacaaatgagcaaagagtttaataaactataaattccatagatctgaagctaaaattcacataaaatatgatagataaaactcacttaaaaagaaaaaacgggcaggctcgtcctatatatgcttctggggtgtggttccttctaggcactcttaactgccagatcaagaaaatatataaatgtatcctaacctatgtacatatatctacaaatatttctgtatgcaaccgtgtgtatctatgttaactgaacatgagtgcatgctgatatctacaactctaatctgttaccacatggatcactctagcctcttccccctgcttatctgtaagcacccactccaacagggagaaacgtggcagctactagccacaatccatttacttatttgtgcaatacatgtagagtggtattaaaattctttatctttttgcctgcgagaaaaactgtatcaaccaaaggacagtggttattgtagtttcttttgcctttattcttatagactccactcatttgcaaagttaatagatctgcacctctctccaccacacccaaaattccctttggtaaggntatttcttacatttttaatacagctagattgttttgtcacattctgcatcccatccccaacctcaaggttttcttaaatttgcatacattaaggtttactcggtgcactctaatgttctgtggatttkgataaaggcatagtgttgtgtacctacaattcaagaatcaaagaacacctttaccaccctaaaaaaaagatatatacaatgttgatgatatgtaaaaaggatacaagagccaactaaaagagttcccagctaccaaaactggaacactttgacaacaaataaagtagtatttgattattacccaaagtgcaaaataaatatccatgactctatacaggcatacataaatgattgaataagtaatggggggaacagacaaatttcccatgtagaagaattccaaataatttatgtagacaccacacccacaagtatacagattaactcctcactttttccttatgtgtgggctacacatagtgtggaaaggcaggtgaggaagagtaactttacagtggagaaaccagaccaacactacctcagccaggtgatcaaggtcaatatcaacagtgacaatgaacattgatagtatgtaccttttatatggtgtgatgaaaacagcactttacctttgggtcttcttcccaaaacccataattctcagtgtaatgatgaaaaaaaaatcagaaaaaacccaattaagggacattctacaaaattcctgactagtatttattaacggcagcttgatcctaatgggatcctggaatagaaaacggaaatcaggtaaaaagtgaggaatcgaaataaagtatgtaagcctataactgttcttaaaagataaatttatttaaaaaaattttaaagaatgggagcaacaagtatagaatctatattcactaaatgtttgtggaaccgatgctaaaacaatgtttgcatccacattcacatatgtagaattcaagtcctgcattaagctccattgattttgcttaagttcttactttgtgaagttgccatgtaactctgaggacactagttaaagtatattgaaaataattytgattcacaggaaaaaaaacagtgtctccatggggttaataagatctcaagagtgaactccctgagaggtttccatttggcacctgtgtggcagatgaatctatctgttagatgggctgaaatttcattggcagacaaatctcaagaacctggatgaacctacctagctcattccaagtttcctcaagctctggacaccatcaacttgactctttcttttttttttttttttttttttttgacagggtctcactctgtcatccaggctggagtgcaatggtgcaaccactgctcactgcagccttgaactcctgggctcaagccatcctcccacctcagcctcctgaatagctaggaccacaggcatgtaccatgcccggctaattttttaaaatttttgtagagacagggtctcactatgttgcccaggttggtcttgaacttgtgagctcaggtgatcctcccaccttggcctcccaaagtgctgggattacaggygtgaggcactgcacccagcccaacttaactctttattctgattttctgttattttaaatattatgaagaatcaacagactgcttcctagtgggcctcctatttgacctctgattgtatcacttctccctatacttgagcgacacatcttcagtgaagcctcataatgtaaagaatagattctgacagcagtggcagaggtggtggctcaggcacatagagtccccatgattcttcagaggctcttcaagttctcctctgtcattcggtcagtagtstcactccctttgcagaagaacrttggtgtcacacagtggcatttaacaagaaacttggtcccatacagaaactcttcgtggacaacattagggactacaaatctaagccacaggcatctggaggacctgctgatactggcccagagcaccagcaagagttggagagtaaacttctgctgaaagcagacaggaatatgttatctaatttcaaatgcraagattmtaaatttgaaaccatcgaaaaaccccagtcctgaagaaataaagtaaaaattaatctggtaatttgtcatgaatttgttgcacaactaatcagaagtatcagagtaagtatacatttcataactgtcaaatgttcttttaattctcattccaaatcaattatttggtgatgttgcaggggaaaaggaataaattctgttggctttcttgcccatgcttcaagtaaggagccacgtttcataaaaatgttctttaaattagccactctaaaaggtaaagtaaattgtaccaataaattgttagaacttgtgctgcctggcataaaagctaaccagaatcttaattgccctaaagtcccttccaaggaattagccactggatactcagtataaaacaagcctaccaacacacacacacacacacacacacacacacacacacacacacacasacacmsagcaatcgagcttgctggccaattatccctttgtaaatgtaatttttttttttgtaaatgcctatatacatgggtattctgaagtgtttcaacacaagaaaaggggaagaaatcccttagtggtattattttaactttttataaaacaaactttatagataccatttccagaatatatttcatatttttcacytgtttcatgttttgtacatttgttgtcactttcttaagagtttctatttgtttgaagtttataatctaatcattttattgaaatatcaaactaagggagtctttaggaatggaatacatgaaatctgcttagtcactaagctggtttatttggggtcaaggatcttattttggagaaggraaatttagagttcagagaaagtactgccatttttccctcccttgttacacttcagaaagttgtaaaatgaaagaaaaaggtaatttagaatgtactaaaggtaggttagtactaatgccaagcatcaggcatcctcataatgcccttaagacatcagtgtaaatatcaacccactcccttcatcccattctgtacacttcaaagtccaacaaatgaccctgtgacagcaaattacagtcacttgattcttaatgttcaaaaataattaacttttaaaggtttaatcatctcataarttgaagtggttaggaaattctttcaacactttttccccccaaagtttgcctatttcccacagatctgtgatctcactggtgataatcattgaaaatctgtgaacctaatacaaatggactttcattaataccttttgtaatcagttgagataaaartagaactccatttctctaattcccaaaactactgaaaaccyagtacgttaggggtgatttcagcattgctgagctccctcagggatctctgaccgtgattctcaaccttggttttgaaacctcaacaaccacagtaagaaaatttccttgaacaaaaagaataaaatttgagttggaatttatacaaataactttgccttcccagtggtcttcttgggatatttcactgtctccagcccctttacttcaaaatgattcactgggaagctttagtttgtggtaaagagataaccccccaactccccaaaaaaagagaaaagaaaaaaagaaaggactacacagaagctctgtagcctggggtgtagagagagatctgccaaaaattaggattgaaaacgtatttttcagaagagttctgctaaggtccccccctcccatgtttcacgaaacattcttgcggtttcagtctagatacacatgtgttattaaataacagccaagagggtcagcttccactcacaggggtcacagcttctaagatgccatgcttaagatcctcttcatttattttttatttttttattttttttattttttgagatggagtctcrctctgttgcccaggctggagtgcagtggtgcgatctcggctcactgcaagctctgcctcccgggttcacgccattctcctgcctcagcctcccaagtagctgggattacaggcgcctaccaccacgcctggctaatttttttgtagttttagtagagaccgggtttcaccatgttagccaggatggtctcgatctcccgacctcgtgatccgcctgcctcggcctcccaaagtgctgggattacaggcgtgagcccccgcgcccggccaagatcctctttaaaaacatctcaaaacgttcttttccacaggcgacttacaagtgctactttataatagcacttttagttaatataagaacttttggttaatataagaagagaaactaacctaattagttctattatctggttgtttgccaaactagcacttattgactgcaccatttccccccagctcaccactagcacatgtaggcctgcactctcccagtatgcccacaaatggagatcctgaaaacctgtattacgtaccacctaacattctgtttaggaggactgtttctttggttcttccagtcatttcctaccagttcccttttcccaatgtttttcctttcaggggactttcggggtggggaggctttgtttctctctcggtcttgtctacagtcatgaaagatctgtgtcttcttggtaaagaaatctgaacctcatatcctattgtttgtttctgcttccttcttttcccaactggcctctagacgggttttttctttcttttttctgttttgttttgttttttttggtatgaagttgggtttccttccatatccagctttggttcatctgtcctcaatgccctccctcccagtcccaacacccaccaaaaggttgtcttttcctcatcttacatattagtaacaaacaataatagcaatgaagtaacccgaagtattaaagaatagctgtgatttgagcccctacatgtactgatcaggtcactctataaaatcaacaatacatattataaaaagggggkttggagggaaataaatacttgtgcataggatctacattttccctttcgtcttatagaagtaatccacatgctttattaaaacataaacaaacaaaaacaaacatacaacatcattttaagttactttctataatggagcttacttatggaatatgtcaaatgaataacacaggacacgaattatcttgttttcatgatcacagctacgtaaaaaagaaatgcatgcatgagaaaaaatgctggtaggaaatatacccaaatttaatagtaactgcctttgggtggggatattatagggatttctttttctactctttctaaaattcycaatttttctattgtgaacatttattatttctataattatagaagactaacataatttttttccaagaggcttactttgcaagatactatgcttaatatcttctcttgcacttgcgccaagcccactctctaccagccagacctggaagagtagrtgaggcagcgcttcatgcctagagcttcaaagtactgagactctccaagcagaaaggaggatgccagccagtgctatcctcatgtcccctatcacctatarggagtgtctctatctccctatcaccttccctcatagggaaagtcaaaacatgctcacacagttcttgttttgacatgtcagtttcaccaacccttcattttttccatccaaatagtcataagatattcagctttggccaaataaatttcatgtcctctttaatctaatgcagaccatgagtgatatattattgcaggaaaatcagcttcagtatgagtgtcaccacatctggtctgtcacccacaacctcactcacactttgacatattattcgatgaaagaacaggagcatcatgttccaggagcttctgtaattccccctgagacactggcattatggtttcacagtcctcaaggaggaacttaacatttaactggatatcttaatttctaaccaaagccacatagctttattttttcagattcaacctcttaaaagtagagtttgcaagatagtgtctaatcaagccattcgcagctttgctgattcagtgatggtttatgcatctttgtttgcaattgggattccagttttacagctgagactccccatctactccatttcccacaggctgtccacttgttcctgcaagatgttcactccccttctccttggcacaacatttgctgctgcccaaagggtccatttggctcaagtaaatggcattaaatatgattaagaaataggatcaaaactttaagcagttcctatttgtttttgagatggagtctcgctctgttgctcaggctggagtgcaatgaacggtgmgatcttggctcactgcaacctctgcctcccaggttcaagccattgtcctgcctcagccccccaagtagcaggactgcaggcatgcgccaccacgcctggctaatttggtatttttagtagaaacagggtttcaccatgttsgccagcctggtctcaaactcctgacctcaagtgttccacccaccttggcctcccaaagtgctgggattccatgcatgagccaccacgcctggccagatcctatttcttaatcacrtttagtgccatttacttgagccaagtagaccctttttttcttatttttggtattgacccatttcatttcatctaccttcttttcttctgtttccttcaaatgctttgccatttttccccatcctacctgcctagaatatgaaggagtcccactctgcactatgatagcaacagaagcagatcttagcccttcaactgatgattctccccttcgacaaaatgccgaccccttacagcatctgcagagaatggggccataagtcctgcattagacatagatgtcagctccttgcggagctggttctggggcaccggcttggatgagcttgccagttgttactcacccaagacatttctccaaccatcattttcagcttataaactaatggtaagtgttaattmttgatgccctgaaaggtcaataaaacattacaaaggatgggtacaaaaaaaaatggaaagaatgaataagasctactatttgatagcacaatagagtgactatactcaacctaatctgtacattttaaaataacttaaagagtgtaactggattgtttgtaaactcaaaagatacatacttgaagggatggatactccattccccatgatgtgcttatttcatattgcatgcctgtaccaaaacatctcaygtaccctaaaaatatatacatctccaatgtaccacaacaacttaaaaaaaatagaaaacaataaatgcataaaacacttctagaaggagaaagaaaacaccaccacaaagggaacttactctgttctgccctgtccaatacaataaaattagataattaaaaatccgattcctcagtcacatgtcacatgctcaatagacgtaggtggccacaggctactacactggatagaacagctataaaatgtgtccatcagcacagagggygccactggaacagcacttgtgtcactgatgaggccacatccacaccacacaattctgaataatacaagtcagcaaagacttacatatctatttatcagcatttatcatgtgtttatcccacaccatttatcagcatttcctcagagactgggcagaataaagcacttataaaataacaaaagaggccagatgtggtgcctcatgactgtaatcccagcactttaggaggccgaggctggcagatcacttgaggtcaggagtttgaaggcgaaaccccgactctactaaaaatacaaaaattacctgggcatggtgatgggtgcctgtaatcccagctacycggcaggctgaggcaggggaattgcttgaacccaggaggcagaagttgcagtgagccaagatggcgccactgcatgccagcctggctaacagagcaaaactccatctcaaaaaataaaaaataacagataacaaataacaaaagagtgttgaagtggcctccagggagagcccatttcctattccagactgtgtctgaccatctgactattgctcacagcttgctgtccccttctc

SEQ ID NO: 9858 - DNA, 12722 bp, Homo sapiens
  misc_feature (7369)..(7407): n is a, c, g, or t
ctgtttggaggcctaagtgtaaagaaagccctttgtcattgctcagaaatggggagtccatgacaattgttgtgcaagagcattcaacactcacccaggtagaaatgggtagatggggatgttgccctttaatcacttcttgctcaacatcatgtaggttataatcaacaccgttctaggcactggagatgcaacaaaaggcagtgttcctagccccaagaagcttatagtctggtgagggagtcagacaattctggaaccatgtgactagtgctatgatagaggtatgcaggcagggggtggttgccatgggatcacagagaaaggttacttaatccagaaaagttcaaagcatttaaagttttgttaagtagcatacaattttttgaaagttgattactccaaaataatctgggaactttctctaagatattttgtagttctatattaaaatatatacatatatatgtaaatatatttataaaataatgaataagttttgtactatgtttgttaaggtagcattttgttattattcaatttcattaacctttaaaatgtgagatctatcaggaggcagtcagggaagttttcctacgaagatcttaccaaagctgagacctacagaacaagtgtcagtaagccagagaaagccaagaaggggagagggtgtgttctgtaaagggaaacagcacatacaaaggctgggagaggtagggcgtggtggctcatgcctgtaatcccagcactttgggaagccaaggtgggtgcatcacctgaggtcaggagtttgagaccagcttggccaacatcgtgaaaccctgtctytactaaaaatacaaaaattagctggcgtggtggtgcatgcctttaattccagctactcaggaggcagaggcaggagaattacttgaacctgggaggcggaggttgcagtgagctgagatggtgccattgcactctagcctgggtgacagagcaagactccatcgcaaaaaaaaaaaaaaaaaaaaaggctgggagacaagaagcaatgggttgggaaagctgggctagtgcttcccaacctgcattgaagagggaagcctagaagtaggatggaagggggtagaagagtaagcaggagtatgacagtggagaaccttatatgttcaacaaggagtccaggctttatcctgaagccaatggaagaagaggggataataaaggcctttgaacaggactgagacaagattagatttttggagggtgaattggaagaaaaagactggagrcaggaagaccaaggggacgctgatgtaataaaccagggaagagaagatggcagtgtgaacttaggcaaaggtcgtggagaactgaaagagatgatggactagacagttacttggactggatttagtgactggccaatgaggggatgagaaagaggggagaatcctattccaccttggccacagcctgtgggtccaggatgttttgtaggtagaaatgagttttagatatatgagtctaattatacatattttaggtaaatttgctgtagagaccaagatagcttttcctttcaaatctctactgcatgaaatcaccttctagcttagacatcttaaaatgcaaatctcaggaggcttacttcctcagggaggtacatctgttctttctaccaattggcgtgggttttggaccttgttatttttgaatcagttacagtctccctgccagctgagggcacataacgtttcattactggcaatactggagtcaaggagcactgcctatcctaactctargtctggagttagagcccgttgagtctgtggtagttccttttgcttttgatatttagttagcaggaaaactragaggatattgaatttcattaacacttccttagaagcacatttccttagaagcatgaatattgcttggattctgaacactctgaatcttcaccaagagaagaaacaaaatgccgtggcaaaacggtaggagttgtctttsgttctcctttagctccagtccatttcttgacataaactycctccatccttgcagacctaccccccatttggtatctrttgrccttcattgtgccctaagctgccttcccctccccttttcttgagaattttacatattttgcctttccacgttgaactatgtatatccccttcctcgtcggcactccccaccataattgtgctgttgtatttcatccataagacagacactctgccctattccagctcttaaaccctagtgtgcttcagaatcactggagatgcttattaaactcctgggccactcstcctgtrtctctgaatcaggaaagctgggccagggcctaggaatctgcattttaacagaaggtaccctcccctgctccaggtgattctgacttggtaaggagaccactctttgagcaaccccacagtctgctgtagcagagcagccctgctttttggacaggagacctgggtttagttccagtgatgccctccaccagtcctgtggctttggggaagtcacttcaactccctgggcttctatttcctcatctaaatcctggagaagctgggagatacattacactggagacctaaactcccttgccccatggccttcccttctttcctggctggaaaaccccaaatctggatggctctacactctgccttctctttcctgcacccaggctactaaatgtrctgagagaaagtcacaggcccaggccaatggtgctgctcagactagctttcaacatcatgcaaaggatcatggccctcctcctgtcagcaacctctctcctgcattaccaaatgctcttctttctcctcaaatgtcaggcccagccattcctcctgcatcttaacatgtgaayttacctttcaacctacagtgaaagtagaagccacaacaggaaatcccttaacttcctaccacacacctgcaaatgcaccagcttccatacctgtcctttcctgcttccttctattgcattgtctctcctctgggatatatcatttttatctcagatgctcgggatcttgctctttcaggttcctctgtctctcctgtatcttccacctcttcccctcttcagttatattcctaccacccagagatttgtgctgttaacatattgatataatcctttcaggtttttaaaaartatgtgtaagagtacattttattatacctcattggaatttttatcaattaaagttcaaaatgaagtagggggagcagagttactatgttataggacttataggaattcggccttacaattgtgggaggagagaaatgaaggcccaagacgagaaaattggaggaagagagcagtcattttcagtcatctgagaagccaagtgtttcctcctggattatccaggtgggtccaatgtgacaacaagcrtccttataagagggaggcagaaggatgtgactacagtagtaggaaatatgatgacaactggagccacgcgagggtggggacctgagcaacacatgcaggtggcctccacaacttagaaaaagcaagggaatgaattctcccctagagcctccagaagataccaaccctgctgacaccttgccgttagcccagagaaactgatttcagacatctggactccagaactgtaagaaaataagtttgcattgttttaagccactaagtttgtggtawttttttgtaagaggcctaggaaacaaatgcacatatccagacacaaagggagaccaccaagggagcatctctggagaagtctgttgaaagctgctgcctctgtagttatgtgctctagggatctgcaggcagctggtgctgggcctgggaccactgttggttggtcagcgggctagaaacaagaggacctggacacagagcggagaactggaccccactagacactcctttgtctgtccttactacatctgaccgtaaatacctgcagaaagcaatggccactttgtcacctctaaatttcacacaagctcctcttgagccagctttagcccatatagggaacagaactctgggacctatagtttccaccttaaccaagttgacacagcacattccaatataggatcgtatggttttattggtttcccaacatactgaacattatggtaagagcagtttgctatatcatgggatattcttccaaactaatttagaagaaattctgatgaaccattatttatttaactttccttctattattgttaactcaggatgttttctgtttttctctatcacagacagtgctgcagcaactctctgtgcatacaaatatttgtcagtatctctgacatttcctgggaatggattcctagaaaggagattactaaattaaaggaagtgaatttctacggagcttgatgattcctgccaaactgctttccagaagtgatgtatcagttttcattcctattaacattgggctcaggccagcattgaatattatattttaaatcttttcaaagagacatttcttgactatctctgatactggtgatcattactggctcaggaattggatgtaaagtgagctagctggactggtgacaccttccctttacctccatgggttcctacaccttcagaagctgcacccttgatgaaaggggacaacatgttctggtgaggaatctagcatccttcagtcaagagcttgggggaagtatgttgcttaaaaattaaatacatcctgagtaaacacgttacgcacaagaaaaagtactgttcctatatcagaaatatagaaacggaaatagaaagcaagtgactttcccaggtatagctagcaagtccctagcagggtcacacttagcatttactttcctaaaattttccatcatgatttaagacatttcaaagcatctatattgtgccaaaaattagattctgcatcacacataggaaagcacaatttttggcttatttcttaaatactaaatcacattaattggctgtttcccattgcaaatatttgaattaataaggatctttttatcacaygtaattttaaatgatcttttagwttttcagctttgctgcaacacagatggaactaaaacaaaattgtataatgctgaagtgacccaaggagaaaacctctcacataattttgtgcagagagtgagtaagcagtctatgccacatcttccccaaatttatattttagctgaaatgtaatggttagacagatagtcagtaattggtacagtgagaagagaaattagttctgacttatcttctctccaaactgcaaagtgtatttttatatacaatttcagaatgataataaaatgatctagtttccatttatcaaaatgagcgatgctgaatgtctgatgactggcttgctttctgaaatcttattttagagttatcagactgtctgagatctttgggaaacttctgcattaagtgagccaattggcaaataaacatctacttaacatgtacaaaactatacaaggctgagatacagaggatgtggcagagatgatcagtggtcatctcagaatggtctctgaaccagcagcatcagcagcaccttggaactgatcagaaatgcttaccttacacatattggatcagaaactctatggagaggctgggcagttgtgttttaacaagccccatgatgtacgctaaagttatctaagaactctgatcccaagaaacaacttaaaatacrcacacacacaggagtcagctctggaaaagaggaaatattgtgtcattagcatatcagaaaatttgaagaagccctgaaagagcaaagctgatgtgttcacattcgcagaggaaaccatagcccaaataatgtagaaaaaaaatatattagtaagggaatgagaatgttttaggaggaactccagaataggagaatactaaaaatggcaggggcaaaaaaagaaaaaaaaatcaaagaaataatataagaaaaattcccagcggaagccacagacgccaggagccctgtactctcagccatggtgaatcccaccgtgttcttccacattcyagtggacagcgagcccttgggccgcgtctccttcaagctgtttgcagacaagtttccaaagacagcagaaaactttcgtgctctgagcactggagagaaaggatttggttataagtgttcttgccttcacagaattattccagggtttatatgtcagggtgatggcttcacacgccataatggcactggtggcaagtccgtctacggggagaaatttgatgatgagaacttcattctaaagcatacaggtcctggcatcttgtccctggcaaatgctggacccaacacaaacggctcccggtttttcatctgcactgccaagactgggtggttggatggcacgcatgtggtctttggcaaggcgaaagaaggcataaatattctggaggccatggagcgcttgggtccaggaatggaaagaccagcaagaagatcaccatttctgactgtggacaactctaataaatttgacttgtgttttatcttaaccaccagaccattccttctgtagctcaggagagcagccctccaccccatttgctcgcagtatcctagaatctttgtgctcttgctgcagttccctttgggttccatgttttccttgttcccttccatgactagctggattgcagagttgaattaagtttatgattakgaaataaaaactaaataacaaaaagaaagaaaaattcccagagctgaacaatgacacgttttcagattaacagttcccacaaaatgctaagcaggttggaatagacacatcttgatgaaatatcagacactaaggatgaagagaaagtttctagagagagaggagaaaaaagaggttacttaaacaggagaatcagtttggcatcagaattctcatcagaaacgctgaagactaacaggcactaaggaatcacttcaaaaatttatgaaaaatattttgaaaaaagtattgggttcctggaaaaactaacattcaagttagagggcaacaagaaaatgacagttttaagcgcaagaaagtcttgttgcattaaagaatttatgaaggggttaaagtttaaaaatattgagccagttgggaaacagtattttagtttgagagaaagaaatatttggatttctgtcagaataattcccaagagaacatttaagaaaattacacattttaaaaaacaaaagcaagaataaaagagagagagagaaagaggaagaggacggaaggagggaaagggagggagggaggaaggaagaaagtaaggaaggaaagggaacgaaagggaaggaaagaaggaagggaaggagggagggaggagaggaaggaggagaggaannnnnnnnnnnnnnnnnnnnnnnnnnnnnnnnnnnnnnnttaggaacaagttcagatttagcagcttagttaagtggcagagaaaagctattaccctctcatatccatttagtggcttatgtgaaatgaactggttttgaagtccagtttcttccacttggaattttgggttttacatgcacagcaagtgtggctagtactgcatcccttgtcctcccttccatggcaagggcaaagggcaaaaaacagatggasttccctaaagattcatcattgtcaccagaagaatagctgggtttcctataagagactagatgccgtcttccttcatttatgcaactgggggacaggaaaggtattgtttgtcctgtgcatcagtagagcactggtttccttgcatatccatatagaacagctggttgtactcactttgtctcccttattccagcatacagagagtgtacaactcagccattcagtgacagtagttttttgaccctgaaatatgtaaacagaaggatggtccaaaggaatcacgaagtaatcctctcataaaagtagtaatagctagctttgtgtacagacagatttcacataattctgatgcaarcttcacaaacagtcccatgaggtgagaaagaaatataatcattatatatttttttacagaagagtaattttaggctcagaggattaaataaaacattcaagaacatgcagcaagttagtcagtctgtctcacttagtgaggactttctgtgtgtcagaacttgctgttctgaacacgtcttttaaaaagggaggtargtccctcaatggggaatktattggctagcagaggcagatgggtggtaaacatgtaaggacattagccataaagataactttagatatgggagattgccatgaagaggataaagtaagtcaagtcacaggggatgacttgagctacggtgggagaggggctgctgcttcagcgtgggtggagttggggaaattctctggattgagacctgaatgttgagaggaaggcataagaggattggagaaagagcaacccttgcagaggaacaaaccccttgagacagcaatgaacttggcatgtacaaggggtacaaaaacagaccagtgtagctggaacgcagtgaacaaagacaaggctggtaggagacagggtccaagaggtaggaagaagccaatcatgtagaactttgtgagctataaggagtttcrgttcgggttttattctaagtgtaatgagaagttttgtttatttgttttcttaaacatctttactaaggtatatttttacatcataaaattcaactgttttgagtgtgcaattcratgatttttataattgaattaattaatttataattataattatatattaattataattcaggagagcaaccatcaacataaatcagttttagaacattcttattcttccaataagatccctcagcccactgacagttattcctttttccatgcaactgctagtctacattctgcctctctaaatttgtcttttctgggcatttctataaatagaatcatacaatatatggactctggtgcctggcttctttcaccaggcataatgtttttgaggttaggtaggatatgttagtagtctgctgttttttattgctgaacagtgttccattgtatggatatgccacaatttgtttatccatttatctgttgatgaacaggtaggttgtttccagtttttgactgttgtgaataatgaatgctgctatgaacagttgtgtacaagtctttatgtggacatgttttctttcattcctcttgaatacatacctataagtggaattgctgggctatataggaatttcagacattgccaaactgttttccaaagtgactgcaccattttatattctcaccaggaatgtacgaagcttctcatttctcaactcaccaacattttttgttgtctgtcttatttatggtaaccattctagtgggtatgcaactatatctcattgtggactgaatttgcatttccttaatagtcgactaatgatgttgatcatcttttcacgtcctccattaccaatggaagagttgtaagcaagggaaaagatatgatatgatttgtgctttgaagaccaatctggttactaaatggcaagtagactatgggcagttggccagttaggagatgattgctataatccagagggagataatagtgtctcagacttgggttataataatggaggtgaagagaaggagtttgaatagagatacattatgaaggtagagacagtggaagtggctaatggattggatatgggatgtggggaagagtggtatttaggcaaacaactaggtaggtagtggtgccatttttttgccaaggggaagcctgatggaggagtaaatatggtggtgatactggggagttggtcctaaacaatacctattttgatcacactacatttttggcatctattagacatccaagaggaaatgttgaatatgtaatcaggagctcaggggagagttctgagcgagagatagaaatttgagtcatcagcatatagagggaatttaaagctttaggacccagggagagtgtgtggataaaagagaatggagtggagaatgaaaccccaraggcattttgaaaaagttgcttatggagatcagagggtaaggaggaaaatttgaaaattrggattgaggtaaagttacgctaagggaagcatcaagaaatatgttcattgactgtactgtccatgacgtagccactaacccatgtggttcagtgagcacttgaaatgtggcttgttgaattgagatgtaagtacaaaatacatattgaatttggaatacttagacaaaaacagaaaagtctcagtaataattgttgaaatgatattttagatatactgggttcaataaactgttattaaaattaatttcacctatttgtgcttttaaaaatgtggatactagaacatttaaaattgcatatgtggctcatatcatatatatatttttggggggcagtactagtctataatgttctacccacagtctcatcctggttttccagaaatgtgactgtggcactttaaggcctgtgtaggaacttkaatttatataagaattctgtatttccccccttctcactactgcacttgactattaaaaaaatgttttaaaataattctgtagatatttgctacaaagctttcttaaggtgytactaggcatagatgacatccacaacctaaaagaagagtgtcagtgccttgggtattttgagtatgtgtttacattgtgcagacagagcaatattttagcaaagacaaggccacatggatcatttgatctttgttgagctgggaaactgcagttaaaatggagatactggccrggcgtggtggttcacgcctgtaatcccagcactttgggagggcgaggtgggcggatcacttgaggtcaggagttcgacaccagcctggccaacatggtgaatccccatctctactaaaaatacaaaaattagctgggtgtggtggtaygcacctgtaatcccagctactcgggaggctgagtcatgagaatcacttgaacctgggaggtggaggttgtagttagccgagatcgcaccattgcattccagcctgggcaaaaagagtgaaactctgtctcaaaaaaaaaaaaaaaaaatggagataccatatccttgatatttrtaagaccaacatgtccttgctggctacaaaaaagttcaatcaaataaattctttcttccatctggttaaatacaacttgattacatgaagagaaacttaattgtttaataaggtcaccatatgaattagaaatgatttttttcttttctttatcatctttgagattctttacatacaataaaaatcagtttttcatcaagttcttgtcctattgctattatggcaagagtttccctttagaaataagaagaattccctttggctggaaatcatagaggcaaactgtgcagatataaggtggtgagacttcttcactctcttccctcgccccagtgaatgaggtcatttgaacaaagtaattccctcaaaggggtagagttacactgtttttgtgttttacatgacagatgattgggcagatttcatgcataaccctgtgggagattttgcagtcacaatatagaaatttctctagtgcttctgattaaaatacagaatcaagagctatagtaacagctcatccattcagttcaatggaggattggaggctgagttttgcatagagttttgtatgagttttgtataggctgaggttgttagaaaatgggagctagggccaggcacagtggctcacacctataatctcaccactttgggaggccaaggcagaaggattgcttgagccctcgagttcaagaccagattgggcaacatagtgrgaccctgtttctacaagaaatatttaaaaattagctggttatggtggcacacacctgtagtctcagctacatgggaggctgaagcaggaagctcacctgagcccaggaggtcaaggctgcagtaatctgtgattgtgccattgcactccagccttggtgacagagcgagaccctgtctcaaaaaaaaaaaraaaaaaaaaaagaaaaaagtgaaaaaaaagagtgttagaaaatattattaatctgtcatattgatccaggtttccaggtggtcatttctataaggctagatcctgcctgtcctacatgtggaagttctctgagattttacagtaccttcctcagacaaacttttggaagaagtatgacttttctggatgtagaatacaaaaattgttcatttactgctttggttccatgtatgatgaccttttccattttagttttctatagcccttttagagttctactttctgttaatatttgtaactgctcttaatattctattattttgtgtgttatataaacacagttaacataaggaggagagagttcaaatttctatcacttaatttttgaagatcttgaaaagagatggttcttttatttagttcargactgaaggtagggggtttttaaaaacatgctgctgggctcctgagagtaagccttatgtcagcaacccctttatatgttcgatacattttaaggggaagagagatcattaaagaaagaaagtggtcatgctcttcaactctatagtcctgggaaccagccacaggaataatagtgttccagccagagtaatcagagcagatatggctaatagatttcaacctgcgttgaaataataaatgattgatacgagctgcctgcagcacagctgtgttag

SEQ ID NO: 9859 - DNA, 12645 bp, Homo sapiens
acagggactcgccacaccacagaggctagtctcgaactcctgagcgcaagcaatccctttgccttggctgcccaaagtgctgggattttaggcatgaccccatcgtatccagcttaagtgtatcttaattttccacaccatcacattattaaatggcaaaacaaactggggataaataattgtaaaaatctatgacatgtgggctcatatcattattacataaagaatattttggataaataagcaaaagatgaacaagccagtaaaaacatcatcaaagacaaaggctatgaaccacacactcctttacaaatacatacaactgcccaatactctaattagcaaagaggcataaattaaaataatggcattatgtttgtgcctctcaagtaatgcaaaacattttaaatggccagtttgtcaagacatgaagaaatgaatgacctcgccctctgctagcagcattgataagtaccagtttctcagcaggtacttggtaacatatacccaaagctgtacgaatgtgcatatttatcaacccagcaattttacagtgatctaaatcagagaaatgtttgaaccttgttaaaaaggattgatcatctacctcctatttaatatgacagaagattagtaacaatggcaaaataagtactggtgtagccgtatgaaatgacattcatgggccttaaaacaacaatgtcaatgtacatttagttatattaaattacaatcgggatatattgttagatgtgagaagctggctgcagaatgaagtcggcagtgtgtatccatgttgtaacccacaaagtctaggaatataaaattccagggctcgacaaccacttaatgcctggaccctttctgcctcgaatgggggtggctagaaacttctctggctggagggcagaaggcagagtgcaaagttttgcctcaagccttgtgacagggataaagaccctcacccttcacactggcctcatggacaagacaagttcttgctttcccacagagtacctgagatctgaggatactttatactctgatagtcacttccggctaccttaattctgctagagtaaaaacaactagtagcttccacctaaccagatgacgcataaaataattgctactaaatatttcattccatattttggttagtaaggaagagaaggaggtaaagaaacttgaagtgaaacaactggaagggaccaagatggagcaggcagagttccttatacacaggagacagcaaggctgaaattctacccagaagatcagcagccctggccaggcacggtggctcacgcctgtaatcccagcactttgggaggccgaggcgggcggatcatgacatcaagagattgagaccatcctggataacatggtgaaaccccgtctctactaaaaatacaaaaaataagctgggcgtggtggtgcacacctgtagtcccagctactcaggaggctgaggcaggagaatcgcttgaacccaggaggcagaggttgcagtgagccgagatcgcatcactgcactgcactccagcctggacgacagagcaagactccatctcaaaaaaaaaaaaaaaaaaaaaaaaaaaagatcagcagccccactatcaccttcctccagggcaaggccacctgtggaaatgacagatgtcaaataatccccaaaggaattgctaaggatggagatgtcccatggaaacaaactgcatattgcctaaccctctcccgaggacatggatatattgagatagtaaatgttttgaaggctatgcaactctgcaaacaaccaagcatgcacagaacacaggctgtctggtgataactcctagataagcaccaatatagcacctcagccacagatggcatgccacacacaatgaattctaaaagtctattttaacctgcgatggccaacatattctcatgtgtgcatgcaatcaatgtaaaaattattgagacgttttaggtgcgactggctggggctggcatwgttggtggtaaaataatttcccaagacagtcgtaggtaaagaaagacagatttattagagaagatatgaagataggttgcaaggatgcaacaggcagcacagaagagaaggggccatttgcaaagaggcagaggttggaggggattttatagggtcgtgctggaggcggctatgtgcacgtgaggtgtgcagataaggtcgtgttcctgggactatgtgcagaccgaggtcttttggaacagaatgtcatgccagtgggttgtttgcagttagccatctctcagaacaattgttctcccccaaccaggggccctttccttgttgttggttacttatcttattaggactccacatgagaccttttaaatgatttttgttttttgtaatgagttccagaaatccagttcgtactttccactgatggcacatctcaatttgcgagttgaatgttatcagatgtacttgccccgtatttagattttcttttttttcttttcttttcttttyttttttyttttttgagacagagtctcgcactgtcgcccaggctggagtgcagtggcgccatctcggctcactgcaagctccgcctcccaggttcacgccattctcctgcctcagcctcctgagtagctgggatacaggtgtgtgccaccacacccacctgtattaatattatggctaatattttgtatttttagtagagatggggtttcactgtgttagcyaggatggtctcaatctcctgacctcatgatctgcccgcctcggcctcccaaagtgctgggattacaggtgtgagccaccgtgcctggccatatttagattttctagggttcacagctgtaaagtaagattcacatgtccaggttgttccaagcatacttcaaagctttccacttcaagagtcatgtcagatgaataatgagaattcctttgggatctaacaacaaaggggtcattgtggccttagcaacagaagcagctgagaacggtgaaggaaaacagaagtttggggtggcctgaggagttgctggaggtgaggagataggagacatagatgtagatgatcttttctcagtggttcatagctaaggggaagggataggcagtagtggtgaaggagggggtcccaggaagtttaggagaggagtgtctgtgtagctcggagaaacttgaacatgtttaaatgccgaagaagggattcagtagaaaaacagaagytaaagatatgggggcatctgtaatcccagcactttgggaggttgaggcgggcagatcatgaggtcaggagttcgaggccactctggccaacatggcgaaaccccatcgctactaaaaataccaaaaaattagctggacatagaggtatgtgcctgtaatcccagctacttgggaggctgaggcaagataattgcttgaacccgggcagtggaggttgcagtgagcccagatcatcccactgtactccagtctgggctatagagcggractccgtctcaaaaaaaaaaaaaaaacaaaaacagatgatacaaaggttacattgcaatattggaagcataaaattaacaaaaaggaagaaggaatgaggctcagatcactcttggtggataaaggaaacatatttatgtatttatgagacaaggtcttgctctgttgccaaggctagagtacagtggcctgattgccgctcactgcaacctcgacctcctgggctcaagctatcctcttcactcggcctccctcactcagctgggacctcagacatgtatcatcacccccagctaactttttaatttttagtagagatgggggtccccctacgttgccctgactggtctcaaactcctgtgttcaagtggccctcccgcctcagcctaccaaagtgctgggattagatgtgtgagccaccatgcctggcaggaaatctctttaaatacaattaaaggaaatttggaaacattcaatgcttatcagggatatttgcagatttggcaactaacgtctttgggaaccatcaggtaagttaaggagaattaaatatctatgaggaaaaaagaaagctggagaaaattttgcaacaggttttggggaaaatcaaggagtaaacatgacagtgcatacacagaaaataaagtttctacgcatgatggattcttcccagttgatggagaatattttgtatttatagtggcactaagacgtcatgtcacgtgattcttttttcagcagtgatcatatgacggtggtagccatggcgtcacagagaacagggaccttccaagtttgaagttttacaaggcaggtgtgataagtggtaaggaattttggattaatctaaatgaatttttttttttttttttttagacagggtctcattctgttgctcaggctggagtgcaatgatgtgatctctgctcactgcaacctccacctcctgggttcaagtgattctcccacctcagccttccgagtagctgggactacaggtgtgcgccaccacacccagctaattctttttttttttttttggtagagatggggtttcaccatgttggccagcctggtcttgaactcctggcctcaagtgatccacccacctcggcctcccaaagtgctgagattacaggcgtggagccaccgtgcccggcctctaagggaaatattgaggtcgcagaccacagaatccaagagtgctrggaatcagaggagagagaggaaggtgaagatacggaggtccggagtaattcaaatacccaaatcacagatacttgytcctcaaggtatgttcatcaagaacaggtatctatggtatgggcatttgaattaaaaaacctggaaatcagaaatttatagtgggtgaataagttttccgatttatttatttatttgttttgagacagtctcgctctgttgcccagactggagtgcagtggtgcgatctcggctcactgccacctccagctcccgggttcaagctattctcctgcctcagcctcccgagtagctgggattacaggtgcccgccaccatgcctagctaatttttgtattttttgtagagatggggtttcgccatgttggccaggctggtcttgaactcctgacctcaagcgattcgcctgccttggcctcccaaagtgctgggattacagatgtaagccactgtgctgggtcagaattatttatttttgagcatggctgtttgggttgctgaaaatgtctggggtgtgggattaaggctcaaagagcagagcagttgataatttcattattgacttacaagctgcaggaactgtgcaaaccaagaggtcaatgtgttaamcagatgaatagtcaagtaatgcataagaatggcaggatttgggctgggcacggtcgcccatgcctgtaatcccagcactttgggaggtcgaggkggggtggatcacttgagttcaggagttccagaccagcctggacaatatggtgaaacctcgtctctacaaaaaccacaaacagccaggcatggtgatgcacgcctgtagtcccagctacgcgggaggttcaggtgggtggatcacttgagcctggggaggtaaaggctgcagtgagctgtgattgcaccactgcactccagcctgagtgacggagtgggacaaaaaaaaaaaaaaaaggcaagatttgagatttagaaaaagactgtcatatttgtcatgagagggagtatcaggacttgagcatttaagagtgacaagggcagaaagagaataaaatagtactcaaacaaggagggggtttgcaggatgatgaaggagattttgaccttgaactttctgtgcttgactcaaatctgcctgatgatgtcccaggaagcaggtcagacctatccccagagggagagaggaaggatgaaagtccagaacagctgagatccttgtcctgagaaggcaggcttcattgatcaatttgaccccatttcatgatttattttaatagtgtaagaggaaaagaagtgtgatggccaagagttcacagaggaagcaacgtgactgtgtaaaccaatgcaaatcaaagcctggcttgagcacctcaatccctttgagaatgtccagttacacattcaagaggccagtaacgagaattacaccccatcctggcaatgaggtcagataccatcaatgggaggagagcttggagaagcctcagcaggtctgctggcagaggagactgcagggactccaggcttacagcagtgcaggagaactttcaagcactttggatcttgccaataccttgcaaaaacttgtccctagttacacaggtggatctctgctggaggatcttgccagtggtctggagcactcctgccccatgccccaccttgcctgctcttcagatgcggtggagataattcctgcagagggagtgggtatctcgcagctcctctgcaaacaatttctggtyactgaggaagatatcaggaaacaggaagggaaagtgaagacagtcagagagagactcgcaatagcactgattgcggatggactcgctaatgaggcagagaaagtgagagaccaagaaggcygtcctgaaaaacgctaagaaaaaaagggaagatagtgcagatgaaataaagtgtaatcctttattaacatctctttgcagtgtccccaatgaggtttttttgctttaagctcttgaaactttaaaatatgccaatacttaaaaaaaaaaaaattaggctgggtgagcacctaagagcacctaagtaagtaagctcagaacagggtgcggtggctcatgcctgtaatcctagcactttgggaggctgaggcgggtgatcacttgtggccaggagttcaagaccagcctggccaacatggtgaaaccccatctatattaaaaatacaaaaattagctgggcatggtggcaggcacctataatgccagctactcrggaggctgaggcaggagaatcgcttgaacccagaggcagaggctgcagtgagccgagattgcaccactccactccagcctgggtgacagattgagactctgtttcaaaaacaaaacaaaacaaaacaaaaaattacactcctttgtgtgacacaagggaataaagacaatartttctttttgaggtgagagattgggtttcaggtgggcagggaaaggagattttttctttttcatgttatactctcatttttatttactatgtrtgtatgtatgtagtccaggctggagtgcggtggtgccatcatgactcactgcaggccaggtgcggtgcctcatgcctgtaatcccagcactttgggaggccgaggtgggtggattgcttgagatcaggagttcaagaccaacctggccaacayggtgaaacctgtctctacaaaaaatacaaaacttagctgggtgtggtgatgtatacctgtagtcccagctattcgggaggctgaggcaggggaatcgcttgaacccaggaggcagaggttgcagtgagccgagatcaccccactgcactccaccctgggcaacagagcaagactccatctcaaaaaacaacaacaacaacaaaaaccaaaaaacaaaacaaacaaaaaaccccaaaacaaacaaaccaaaaaacccaaacaaacaaacaaaacctcactgcagtcttgaactcttggactcaggtgatcctcctgcctcagcctcctgagtagctgggactacaggcacatgccattacatctggctaattttttctattttttgcagagacaaggtctcactctgttgcccaggctggtttcaaactcctagacttaagcaaacctcccacctcagcctcccaaaatgctggggttacaggtgtgggccaccatgcctggccagtattctatcatttttaacacatcaatctcagaaactggtaaatccatcaaacaaaagcaaattaatgataaagaggactggaataattcaataagcttgatcaggcaagtagacaaatagactttaactcgtattcccaacaagcagaacgatggtgcatcgttagattcttaacactgaaaagtctctctctcttttctttttttgagacaggggtcttactctgtctcccaggctggagtacagtggtgcgatcttggctcactgcaacctctgcctcctgggttcaagcgattctcatgcctcagcctcccaagtggctgggattacaggtgcccaccaccacacccagctaatttttgtatttttagtagagatgagatttcatcatgttggtcaggttggtctcgaactcttgacctctagtgattggcccacctcagcctcccaaagtgctgggattacaggcgtgagccaccacgctcggcctgaaaagtttttcttgatattattatccctcaaattgtgtcgactttcctgattcaaatttcaaacacatatagacttagagaatcagggaaagtctggtagttcattaaatgcaactctgaattaatgggcaatcaagaacagaaaaataactagagttagatagcttatttgagaacgtagatataaaaaactctttccttaaatattattttggaatccactgggatatttcacaaaaataataatcaattctgattgggtaggctttatcctgtgatgatgaggacaaagcactgaataattttataatcttgagtactgcctactgactttaagataagtgaattaagtcagacacagatagaaaatgatgcattgacctcacttctgtgtggaatctaaaaaaagtcatatagactggatgtaggctattggtattttttttcaagcaaacaaaacattaaaacacattctaaggctgcacgcagtggctcacacctgtaatcccagcactttgggaggctaacgtgggtaggtcacctgaggtcaggcattcaagaccagtctggccaacatggcgaaaccctgtctctactaaaaatacaaaaattagctgggtatggtggcacccacctgtaatctcagctactcaggaggctgaggcaggagaatcgcttgaacctgggaggcrgtggttgcagtgagctgagatcgtgccattgcactccagcctgggcaacagagtgagactccatctcaaaacacaaaagaaaacaaaaccaaaaaaatccccacattctaggacacacatgattaccacgtggaagcacagagcagaaaagatgaaattttaaaataacaaatttttagggaagctataaataatatagatattgcactctattttttttttttagagatggggtctcactgtgttgcccagacttggagtgcagtggtgcaatcatactgcagcctcaacctcctgggctcaagggatcttcctkcctccgcctccctagtagctgggactataggtgtgtgccaccacatccagctatttttttcttttagtagagatgggggtctcattatgttgccaaggctggtctctaactcctggcctcaagcgatcctcctaccgtggtctcccaacatgctgggattacaggtttgagctactgtgcctggcccatagaaccatttctgacccgtttatgtcttcttggtctacttcccattgtagaggacccgtgagrtggataatatgccacccagggaacactaatctggaaattctggtgcatttgagtttcagagaatgaaatagtggaagagaaacttgcaactgccagggtttcttgggggcagggatgtgggaatataaaggaacaggatgggtgtgatggctggtataggagtcaagggtgggtgtgtactgagtgacaaaggtgggagaccttacactgaagtggaatgttgattttccmccatggcaatttcttttttctttttttgagatggagtcttgctctgtcgcccaggctggagtgcaatggcgcgatcttagctcactgcaacctccacctctcagattcaagtgattctcctgcctcagcctcccgagtagctgggattacaggcacccaccactamacccagctaatttttttgtatttttagtggagttgggtttcattatgttggtcaggctgttcttgaactcctgacttcaggtgatccacctgtcttggtctcccaaagtgctgggattacaggtgtgagccaccgtgcccagcctccatgatggcaatttctgtatcagtgaaacaggaggattccctgagctcccttgcaggacatgtgacaggggtgtggctcatctgtttggctgctgggtgactcaaaccccttatgggacggggagcacacagacaggcaggtgcaggagccggggccagtgtccctgggctctggccccatggcagcatccacrggtgggagactgcaactcccaaagcccaagtggctgtgtgttacagtgtgctccttagccttgctgtctgtggatggctcaagtgttaaccagctcagtgccctcttggtacccaagtccttgtccagcatccaggaagaatcaggtcacacatagacttgaaggatgaatgccagggttttgttgaatgggggaggtggttctcagtgggatggatggggagctagaagggggatggagtgggaagatgatcttcccctggagtttggctgtccagtggctagtctcctctctgactgtccccagttgaactcctttcggcattcagatgctccttctcttctctctgctgtgtcgttctgccattcttctgcttgtggagcctggggtttgaggtttatatgggtataggataggggagcatggtgggccaaaaggtgactttggggcatgaaaacaggattgtctgttcccatttagggccacaggtctccaggcttgagggtggggcctttgctggggaacctccctcttctacccagtatttccctgtctcctgtccatatcatcagtaatgtagtttggatatgtgtccccaccaaatctgatgttgaattgtaatccccagtgttggaggtggagcctggtaggcggtgcttgggtcataggggcagatccttcatggtttgatgctgcctttgcaacagggagtctgtacttgtgagatctggttaagtgtgtggcacctttgctccccccaactctcccttgctcctgctctggccatgtgacatgctggccctcycttgtgacatgctggccctcccttggccttcaccatgattggaagcttcctgagacctctccagaagctgatcagatgctgacatcatgcttcctgtacagcctgcagaactgtgagccaattaaacctcttttctttaaaaattacccagtctcaggtatttcttttttctttgtttttttttttttttttttttttttttgagacaggatstcactctgtcattcagggtggagtgcagtggtacaatcacagttcactgcagcctcaacctcccaggctcaggtgatactcccacctctgcctcctgggtagctgggactacaggcacgcaccaccatgcctggctatttttaaaaatctttgtagagacagcattttgccatgtttcccaggctggtctcgagctcttggactcaagcaacctgcctgcctaggcctcccatagtgctaggattacaggygtgagccaccgagcctggccaggtattttttttttttctcttgttctttttttgagacagagtctygctctgtcactcaggctggagtgcagtggcrtgatcttggctcactgcaacctctgcttcctgggttcaagtgattctcctgtctcagcctcccaagtagctggcattacaggygtggaccaccatgcctggctaattattgtatttttagtagagacagggtttcaccaagttggccaggctccggtcttgaactcctgacctcaagtgatccacccgcctgggcctcccaaagtgctgggattataggtgtgagccactgcgcccggccaggtatttctttatcacagtgcaagaacagcctaatacaatcattttcaccaattctggtgttcccaagggatgacatggtgcgaaaccacaacacacaactgagagttgcctttgggacttcacgaaggtggaagactgttctcttagtccaacatgaaccagtcaggggtcacgtcaaggaaggctcagagactgtgtccgaccaatatggtttatttctgccccagccaagcttctttggaccctggctgggggaaaggcaccccaggcaccggcaagttccagtcattgcagatcctccaggtctaggtgtgactggtagtagcctgggcactgttgctggacgttgtattctccttccttcttccgccggygggtggtcacctatgagggtgaggaggaggcgtgagaatggactggtcagccgtccagggagaggagaccacaggggtgagaatatggccaaagccagaggccttatgcttcctctgtctcccttcattgtttcatttaatttctccctcagttcttttcctcttttcaccactttcttttcttctgtctccttgtttcactctcggtttaaaaaaatttttccccctccgatatccccttcatttctctctccttttgcctctgaatttctttatcaatatatcacatatctaccaatgatctatttatct

SEQ ID NO: 9860 - DNA, 79392 bp, Homo sapiens
  misc_feature (45673)..(45673): n is a, c, g, or t
cccgagtagctgggactgcaaggcatgcgccaccatgcccagctaatttttttgtatttttagtagagacggggtttcaccatgttggccaggatggtctcaatctcctgacattgggatccacccgcctcggcctcccaaagtgctgggattacaggcgtgagccaccgcgcctggcctattaatttttttttttttaaccaagaaggctgagtgtggtggctcacacctgtaatcccagcactttgggaggccaaggcaggtggttctcttgaggccagcagttcaagmccagcctggacaacatggtgaaacccggtctccrctgaaaatrcaaaaattagccaggtgtggtggtgtgtgcctgttatcccagcaacttggatggctgaggcataagaacctcttgaatccaagaggcggaggttgcaatgagctgagatcgtgccactgcactccagcctgggtgacagagggacactctgtctcaaaaaaaataaatacaataaaatattaaaatattcaacaaaaccaagcactgtttgactctaacctgtgatccactttcgtgaagtatttgacagagcaaaattacattgccaaagaggaattcagcctttgcagtctattgagatgggtttttataataaatatagtttaagtaattcatctctgttttcccttccctaattttatgctgcagtttcttttaaaggtgtgtgttaatagcattgcattcytttttttaatcttgaaagcaaattttgtagaaaaatcattatcatcatttaggcgctcacattttcagtggtttaagcatattttgtacatctttaatttttatttcacygtaaaacatatgatttcactacatgtatttgaattttgtacagtgtggcagaagatggaaaacattcttccatcaaggactattattgaactgtttggctgagttactcaaggtcttgctttagaactataaacttcacgtaagaggttattgtctcccatccccagcagccattacccttcctttcgtttcaagcccagatttgtgttttctccttgtctcagtccacgtgctctctgtgaggttccactcacagctccaggactggaagacatgaccctcacctggccaatcaaatgatcaaatcctcttcccaggatggggaagggaggctagagtgattggtttaaggagggggttgtggtccagccatagcctgtgaaatgcagtgggacttttctgggattggtgggagagaggcaggggccctctttccacccaagcttcaatctgggaaaaggttgggtgggaggtgcagcagcccagttgaaagccttaagctgctggcagaggttgggagccttggaagagcctggggctgaatgaagccaacccagctgaagatagactggagaggtggaaacatagtcccgatgatgtcatttgaaccctggtgtgaggccagccctaccagaccagcctgaccagtatagttttttgagccaataaatcttcatagtgcttatgccagtttagttgggtttcctgttactttcaatggaagaggctttttgataacactggtcatgccaaggctggtctggagttcaaatgtgctgggaatttgccaagatgaggctccaggcactgagaatgaagctgaagtctggttatcagaacccgggctccagtgccaggtcccctccctggcctctgcccagagaaggagaatccctatgctggtttctgtagaggggcactgaagctacctacagccttactttcccgggtcaagtctgttctgagagctgagagcaggactggacttggaggtgggggatcacagccctccagcactggggagaggagggcagggtggagagaggagggcagggtggggagaggagggcaggctggacacatattgtgagggggctatagtaagacaaaaaactcacccagtattacatctctttcattgcagggacttttccctgctctgtttctcagtgtgcccatgagagcagggaatgtgtctactttgggtctctgtcccgaacattcttttcttcttcttccccttctccttctccttccttctttcttctttcttcttcctcctgtctcccttctgtcttctctcttctttattcttcgagatagggtctccctgtgttgcccaggctggtctcgaactcccaggctcaagtgatactctcagcttggcttcccaaagtgttggaattacaggcatgagccaccacacctgccctggaacatcttctcaccctgttgtggtctgcctaacttccacaactggattagacatctctcctcagtattctcctayatgcctttacttaatgatcatcacatttcttgtcccgtatttttattcattcattcaatagctatttatcaagtgctattccaggcactggtggtacagcagtgaacaagacagacaaaagttctgccctgaaggagttatgttctaataggcagagatatacaaaaaacaaaataaattataagctattttctttttctttttagacggagtctcactctgtcatctagcctggagtgcagtggcacgatctcggctcactgcaacctctgcctccgggttcaagcgattctcccacctcaaccttccaagtagctgggactgcaggcgcatgccaccacacccggctaatttttgtattttagtagagatggggtttcgccctattggccaggctggtctcgaactcctgatctcaggtgatctgtccatctcggcctcccagaatgctgggattacaggcgtgagccaccatactggccaattatgagctattttcttttttctttttttttttaagacatagagtcttgctctgtcacccaggctggagtgcagtggtgcaatcttggctcactgcaacctctgcctcccaggttcaagcaattctcctgcctcagtctcttaagtacctgggattacaggtgtggctgattttttgtattttttagtagagatggagtttcgctatgttggccaggctggtctcgaactcctgacctcaagtcatctgcctgtctcagcctcccaaagtgctgggattacaggtgtgggccaccatgcctggccaattatgagctacctttcaaagtagataaatgtgaaggggaaaaacagagaggataggaactgacagggaaagggcttgtaatttttaatggacttggaagtgaagacttcattgagaaagtggcagttgagcaagacttgaagaagctgagtgaacgtgccatgtgggtatctagggagggagaaagctttccaggtgaatgcaacagcaagtgcaaaggctcttaggygggggcttagtgtttgagcaaggaagccagtttgggaggagtggagtaagcacttgggagaggagtgtggctgggaacatgggtagattgcagatcacccccagccttgtagatggggagcaatgggggcttttcaggagaggaggaagatgacgtttgttttttgttttatttatttatttttagagacaaagtctcgctctgtcacccaggccrtagtgcagtggcacaaacatagctcactgtaaccttgaactcccgggctcaagtgatccccctgcctcagtctccttaatagctaggactgcatgtgggcaccaccacacctggctaattttttaaattttaattttttgaagagacagggtctcgctatgttgcccaggctggtctccaacttccagcctccagcattccccccaactcagcctcccaaaaggctgggattacaggtgtgaatcactgcgcccagccttgtctattttaaaagaacctttggctactcagytgaggatggactgttaaataacctctctcccatgctcatcagttcatttcataacagcagagactctaattgtgtcgttcatgactgcttccagtgacctacccaatgtctggctctttgagcttgttgaatgaacaaaagaaggcctgagcatgtggctagacagagatattcgctgttcattgcatgacacatgtcaaaaattgaatctcggccaggtgcggtggctcacgcctgtaatcccagcactttgggtggccgaggcgggcagatcacttgaggtcaggagtttgagaccagcctggccaacatggtgaaactccgtctctactaaaaatacaaaaaaattagccgggcgtggtggtgggtgcctgtagtcccagctacctgggaggctgaggtgggagaatcacttgaacccaggaggcagaggttgcactgagccaagattgcaccattgcactccaggctgggcgacagagcaagactccatctcaaaaaacaacaacaataacaacaacaacaaaaaacaacataaacaaaaattgaatctcagctaattgtcagtttttcagagtaatgaaagaaaactgtggttcctgtggcccacatgcacagacgattgtgcagattagatataaaaattataacatttgctcaactttcatttactagtccagctgaactctatgcattggcaagtggatgcattagcactcatgtaaattactttagaaatagtggagtgttacagttactttctgttcaatcctatcagcagagatttgacacagaaaatatttctagtattacagcagggtaagtaatggcaatgcatgagtgctccctgaccctacccccacctcctccaaccccagcatcattaattttaggaaaccctttatagcagaggaagacaacctgtggtctgcaggccaaacgcagcctgtggcctgttttcatacagcctgtaagttctaagaagggcttttacatatttgaatagttgaaaaaaagtcgaaggaagaataacattttgtgacatgtgaaaatgatacagaattcagattttagtgtccataaatacagttgtatttgggtgcagccacacgcattcattggtatattgatgtggctgcttttgtactgcacctgcagagctgagtggttgcgacagacttgatggattgtaaagctcaaaatatttactagctggctctttgcagaaaaagttggctgacctctattttacagtaatgccaaagtttccttcccaagttgtcctgaatagtttgtattttatgagtgtgcactttttcctgaagtacgttaccttgcactttacgtgtattgaaatgtatcagcctcttttctgcatattcytgcctcttcgcgattatcttcctagagtttattacaattaactattaaccatctggaaattcaggtgtcctttgtaaacctggaagtgtcggtgtatgtatcttttttttttttttgagctggagtcttgctctatcgcccaggctggagtgcagtgacgcaacctgggctcactgcaacctccacctcctgggttcaagagattctcccacctcagccttccgagtagctgggattacaggcacccaccaccacacccagctaatttttgtatttttagtagagatggggtttcactrtgttggccaggttggtcttaaactcctgacttcaagtgatctgcccacctcagcctcccaaagtgctgggattacaggtgtgagccacagcacctggccgactgtatatattattcaggaatctttagattgcaggtaacaaaaacctcattcaagcagcttaaagagtcaagggaattatcaccttctataattgaaaagttaggtttaggactagtttcaggtgaggtttgagttgacctctcaaataatgtccctaaagacctagtttgatccttctttcttctcagcagtcagctggttttcactctctggccctgcatgatgattccaggttctyttcttgaggtaycaactggttatagcagttccagaccttgtaaccttatatcacaccttagtgaagaggggaatgtctctttcactagctcatgcagaagcaccwcttcccagaagcactggcaaacatctcctggagtgccattggccctgatcgggttgcaggcccacacctaagccagtctctgtggtcaaagatgggatacactgatgagcttatggtaaccaagatccacctctgcagctagaggtgggttattcctacccaaactgtgtggctgaagacaacagatagggatactgttggcaggagaagagaggagtggatgctaggaaaagcaccaataagcatccactagattggacattctacctttgtgcttatacacagctctgaccttggggccactccaatatttacccatgttcatcctgggaagtgtctgtttatttctacctgttctttgtgatgaaaaggaaacctggtcctgacttggctctgctaccgattagcttaatgagctcagagaagtaacttacttttctcgtcctcggttttcttttctgtataacaagaaagggatcaaacatgctatggtgagtattaattccaccagtttgttaggtgagactcaatgagtagatgtcagggtcctctctaggatgttcttaatgactgtaacaccttgtgcccagtacttattagatgctcagtaaatatttattgcatgaataagtgaatgatcatgttggtggactagcagttccttgtggttttatctcttttttttgagacagggtctcactctgtcacccaggctggagtgcagtggtgatcatggctccctgcagcctcgacctcccatgttcaagcagtcctcccaccacagccttctgagtagctgggactacaggtctgtgccctcacatctgtctgattttcaaatttttgtagagatggggtctcactatgttgccaggctggtctggaatgcctaggctcaagtgatcctcctgccttggcctcccaaagtgttgggattacagccctgagccaccacacctggctagcctgtggctttatcttgattcctttcaaatttaggwgaatgacattgatcctaatttcctggattctccctgaaagcgcagggttggaggctactctctaaagcagtgtaatgttaaggaggtgtcctgggtatggcaatcaaaccgagcaggaaggggtattattgtcaaggttaactaaagtgcatagaggaaaggaggaaagagggtagtgaaggttacagggaaatagggatcagaggctacttcagtattaactgctgcctaaggagacactccaaaagttagtagcttaatacaacactctgttgttcctcttagttctgtcatttgactaggcaattctgctggtctcacccaaggtccctcatggggtgctcagccaggatgctaggagggctgggtctcaccccacatggtttctcatcattcagttgtcttgcctggtcttacacagcaagtgagtccccaaaaggagcatcctgaggggacaagcctgaatgtggaagcacttatctagcctctgtttgaaccatacttggtaatgttccattggccaaagcaaagtcatatggccaagcccagaatcagtgtgggagagaacgacatatgaggatgtgaatatcaggatgcctggttcactgggaagcatccagagaggctcagggatcctggtttctaaacccattgaaagagtggggcaagggtgtacatgatcgatgggctgtggggttgggatggggtggaggagaggccaggtcaagaatgttgaccacattcctgttgactagcttcatcccttggtagagccaaggaatcaccgaggagactataattccccatcatttccatcagcctctgctyccttttatagaaatacttggtgtcattgcagtcttatttaaggtgctgtgcaaacatggcttcagcataagttcccaagctgaatatccaactagactgctgcctgtaakttccacctatatacacattttggaattaccactgaccctgtaaacaagaggaaatgagatttagtgaatcacatgggccctcagtgataattgctacctttgttaaatgctcataaaaakatctggcaggccctcttctctgaactgcagttctccttctagctctttattgtccttggccttgggagtcatttcagtgcccttctgattattttgtttttcaaagtgaaaactttacacactgtttttcttggctttataaatgttatatgctttttaaaacacccaaacaacacagaccaatataaagaagagtgtaaaatcctcttgaaagttcaccacccagagggtaccactgttgatgtgttcatgaacatgcttcagttgtccctcagtgaacatacgtgcacacatgcaacaaatgggatggtgctgtggcctgttttttgagacagagtctagctctgtcgaccaaactggagtgcagtggcatgatctcagctcactgtaacttatgcctcccgggttcaagtgattctcctgcctcagcctcccaagtagctgggattacaggcatgcaccaccacgtccagctaatttttgtatttttagtagagacggggtttcgccatattggccaggcttgtctcgaactcctgaccttaagtgatccgcccgctttggcctcccaaagtgctgggattacaggtgtgagctgccacgcccagcctgtggcctaactttttaaaccccattttatgaatgtgcaaatttgttcaatcccacatttatggatacatgggttgtttctaayttttgcaattctgattaagtaatttttgattctctgattttaaatatgcccctgaggttttcctttctctgtctggaatctattcctattttgccaaagatgccatctgtgtaggctttcttttcttttgtctcagcagctttcatcatggacatacattttgtttaggacctttaatagtactccttttataaatggttttcaagtaatgtgtaatagacttttaaaagcttgttttaatcttctctttaaatagagtatgcattttggttgactaaacattcacctgtatagctgggtcgtargttcatgggctgctctccctcccattgttcagtcacattgtgtgtaaccacggttaccaggcttggtgtcattacttccttaaggtgatttcatgccatcagcatttccagcccccaggacccctggctgttcacaggctaaactccttccagaggtttgatgccctggcggtgctggagtggggcaggcagtgacagatcctaactgggggctgggcacagtggctcatgcctgtaatcccagcactttgggaggctgaggtgggtggattgcttgaggccaggagttcaagaccagcctggccaacatggtgaaaccccatctctactaaaaacacaaaaaataagccaggcgtgatggcacgtgcctctagtcccaactactcgggaggctgtggcaggaggactgcttgagcctgggaggctgaggctacagtaagccatgattgcaccactgtacttcagcctgggtaacagagcaagaccctatctcaaaaaagaaaaaaaagtcatacaagtgtgtaaagagccgtgtataatgattacacataaatatttgaaaaacaaacatctcgcttatgaacgtatttgaaaaacaaacatctctcttaagtctctaagttaaaaaaatactttatagaatgacatgtataataggttgtcatttttgtgacytttttttgtggcagccaggagattgtgctgctcaggtcaggtttaagagaggacctcctcctcagaaatagcaccacacatctacaaccatctgatctttgacaaacctgacaaaaacaagaaatggggaarggatttcctatttaataaatggtgctgggaaaactggctagccataggtagaaagctgaaactggatcccttccttaacaccttatacaaaaattaattcaagatggattaaagacttaaatgttatacctaaaaccataaaaaccctagaagaaaacctaggcaataccattcaggacataggcatgggcaaggacttcaatgactaaaacaccaaaagcaagggcaacaaaagccaaaatagacaaatgggatctaattaaactaaagagcttctgcayrgcaaaagaaagtaccatcagagtgaacaggcaacctacagaatgggagaaaatttttgcaatctacccatctgacaaagggctaatatccagagtctacaaagaacttaaacaaatttacagaaaaaaatcaaacaaccccatcaaaaagtgggcaaaggatatgaacagacrcttctcaaaagaagacatttatgcagccaaaaaacacatgaaaaaatgctcrtcatcactggtcatcagagaaatgcagatcaaaaccacaatgagatgccatctcacgccatttggaatggagatcattaaaaattcaagaaacaacagatgatggagaggatgtggagaagaaataggaacacttttacattgttggtgggagtgtaaattagttcaaccattgtggaagacagtgtggtgattcctcaaggatctagaactggaaataccatttgacttagcaaacccattgctgggtatatacccaaaggattataaatcatgccactataaagacacatgcacacgtatgtttattgcggcactattcacaatagcaaagacttggaaccagcccaaatgtctatcaatgatagactggattaaggaaatgtggcacatatacaccatggaatactatgcagccmtaaaaacggatgagttcatgtcctttgcagggacatggatgaaactggaaaccatcattctcagcaaactatcacaaggacagaaaaccaaacactgcatgttctcacttataggtgggaattgaacaatgagaacacctggacacagggtggggaacatcacacactggggcctgtcggggggtgggagactgggggacggatagcattaggagaaatatctaatgtaamtgacaagttgatgggtgcagcaaaccaacatggcacatgtatacctatgtaccaaacctgcacattgtgcacatgtaccctagaacttaaagtataataaaaaaataaaaataaaaaacagcaacaaaaaaaatctaaaaaaaaaaaaaaaaaaaaagagaggacctcctgtgagggctgtgggtagcttcagcccctccctgttacaccgcagcgttcgcgtggaggtcacactcttcttgagctgccctcaccagtgactgagcaccaggaggacactacagtcccgaagcctgaggctcttcctgcccaatccttcctccccttctctcttctttggtggcagacctgcagcagggtctgagactttctgggcctgctcctattccctcactcctttatccttcttagatgtttcttccaattagtcttttgtatgtctaattttgtcttagcgtcagcttcctggaaggcccaacctgacatttctttgttctcaggaccctgacataatggagatggaacaacctctgaaggttgttgtgaggattaaatgaggtattgttgagaaaggcttagcagaaggccagcacagaggaggagcttagtgatattattccccaggtgagcaggtggagaatggtatctgtcagatgtcagtttcattagctgttgcaacccagtggactgtccctgaatacctgtcccctgggagtttcttcaggrataagggactcaaaattggaaatgggaagccctgggaagatgcatcccaggccctcagggagtgagcatacgacctctggaagaaactcctggttttggggaggtcctagtgcggagggggagaagcccaaatgggaggctttgagctttatccctcactgacaacagcaccggccactcgctgtagcttggaggagagagccaagggcagcagaacatggtgaacctgggcgtcagagtaaaatcccagctctgccatttactacctacccaccagggctgctgttagatttaagatgctaaagatagaatgctgagcacagagtgaatgtctaagacctactagttccactcccctccccgataccattttcattctaccgttcttgtaactactctgggtttgagaattatggcaggagactgtgctaaggagccaaagtctaatctctggattgctgagaataaaaggaaggtctggggaaagaaaggagggagggcaagtgggcatgaagaagaacagagctttcattaggcaagtgtttatgggcaacccccacgtgccaggctctctgctgggtgttgggttatgcaggtgattaggacacaggcactgttcttaaggagctcaggtgctgaaggggaagttactgttgtggactaactggtctgtaagtcgtacatggggtcccgtaccacaggcaggcacagagcttggcagcagtgcgaccctggacagaattgtttgtgaaacgtctccccttccagacgaagtwattatagctcttgtgattttgtgtggtgcctagatttcccccgttgtacactcagttcaggagtacttactcaagtctcactcaagggcatggggaccccaaacaccttgttcatgtgcaccccagggcccagcacactgtaggcagatgtgtgttgactgagtggtcttcagtttccttattttaagatgaagataatgttgatcttaacaggctgttgtgtggattaaatgaagtaatgtttatcaagtgtaaatcgccttccaaatgttattattgtagacttttcaaattggtgcagtctcttgtggattaagccagtgacttgagcagtcattctataccttcctcatggctattttgaagattaaataaattaatataaataaaatgcttagaacaaggcttatcacatcacaaacactcaaaaagtgttagctaaatcaacaaggataaaatttcaggtatgcaagatgattaagttktagagatctctatataggtgtagtatatagttaatactgctgtattgtgtactggaaaatccattaagagggtaggtcttatgttaagtgttcttttttttttttttttgagatggagtctcactctgtcgcccaggctggagtgcagtggtgcgatctcagcttgctgcaacctccacctcccgggttcaagcaattctcctgcttcagcctcctcagtagctgggactacaggcatgcgccaccatgcccagctaatttgcgtayttttagtagagatggggttttaccatgttggccaggctggtcttgaactcctggcctcaagtaatctgcccgcctaggcctcccaaagtgctgggattacagacatgagccaccgcgcctggcacgtgttcttgccacaattaaaaacaaacaaacaaacaaacaaacaaatgtaaaggaaaaaatataagtaagaaaaaatcgaggcagtgttacagcttgtcagagtgctcagaacaaatgctgtataacttctagaatttatcatctacattggtttataaccatttactatttcaaawgtggtgacaaaaggtggtggtgggagatattaggtactttaagtattatcttcgttgccattcttcggtgtcattttacccattcgaattctgaggttcagagaactgaagccccttgctcggattgcagagcctctcccccttgtacccgggagactgttcctagtggctgttctgggacattctcagagcggttcgccaggtggcgctcttcccccgggataggatccggccaagacccaccccgcggcagacgctagcccttcctcactgcaagaacctggcgttctacagccagcaggggttttgagcgtgtctaagctctcattttagagggagagaaataaagctctgcgagagtatgtccctgggctcagagccacccacaggctccaggtggtgctggggcggagtcccagtttatccagtgacgaatcccatttgcctcttacctccctgcggcatcctgacctagctccccacgcccacctgagccccttccttgcagacaccatstcatgcctggctgcagctgggcagagcgaagtgcttctctgccgagctgtcgcaaagctccactatctaggagtagagcgagtgtttgggagcagggcaagcgtttaggcaggctggggaggggtgagggggatacccagggacgcaccctcccgtttctcattcgtctctagctgcagtcagaagcagtgtatgcactgctaaggccagggcccctggagtcaaactgccttcgcggaaacccttggcctccccttacccagcagtgggccctgggggctcactaagtttcccatctctaaaatgggaatagtaatacttacctcattgggtcaccgtggggactcggtgaacgtacataaggcactgaggacggttgtaagcacatgataagcacaataaaaatgttagctctcggcaagacgactcaccagcaccctacctggatagaagagtttaggtgagaatttcaggatgattcatcatactcctcgcctattcactcaccccacaatatcctttcagagtaacaactgccgtttattggcagttatgccaggcagtatgcgaaacctgtgatttccatgatctcaattaatccgcagatcaaccctgtgaagtaggtactattattgttcctctctcatggttgaggcttacacaagattaagtcatttatcccaggtcacgcagttaatgacagaagtgcgtcccacgctcattcctgtctggtgccaaagatgaagctttttactactactcaatattctacctcctcttgaagccagttaaaaacaacaaacacagcccctcaacaaacacaggctcccaaaggagccacaggcatcagccgtgctcactgtaattctacaggacccaccccttacagaaaccatggtctgtagagtgagatttctttctgctcttacgtggcacaaaagagagaattttacagatgtctccctgctcccctgcaaagtgctttgactgacacagaggcctctacacattaaagctaagttagccatggagcctttaagggccaccttcccctcttcctgtttcttctgaacctcaaggccacccatctgggcaggcgggggacctgcatctcaggcatgtgcgttaacttaacttctgggccatcccggatgtaatgcaagggctcagtgactcaggccagtctatctgggatttgtcctctcttggcatgtgagagtctgtgcagcattgacatcttttggccatgaatgaarcaacaggaaccaacctacaaatgcagaatcccagaaagtcagggccggaagaggctgtaggaagttaaaaaacgaaacttcaccaagggaagggtcttgatgaggatcacattgagaggaaggaaggtgaccagatttaagcccttttttaacttccataccttcctggtaccctctgctcccagaggtgctgagctgggaggggtgggagtgggcagccaggttgctaagcttgtgcattcagtcaggtgtctctttcttcccctccccagcatgtgattatcctctaaaacaagacttctcaacctcagcatagcccagacatttagggttggatcattccttgttgtggcagcggtcctgtgcattgtctgatgctgagcacaatatttgtccactacccaccacccactggtttccagtaacacttccttctcccactctgttgcatgacaaccaaaaatgtcttcaaacatcatgaaatatctcctgggggacaaaatttctcccctctctcccttctgttgagaaccactactccaaaagcagactccttcctccttcccttcctggaacacatcttaagagcttggtatatgccatgctttgctggctcatgaatcaagccctggctctgtccttaaasaattcagagtctagctgaggagacaaggcccacacaggtggcaaagatgggaagcctctccacagagacaagggcgaggtgcccaaaggagcacaggggcagatgcctcactgtctggggagatgtgaggaagcgtcacagaaggacagatggcaatttctcaggcaggcaaggtgggtaaaggacattccaggcagaagaaatggaatgtacaaaggtaaagagttgtgaagtgtgaagttttggggaaaaatattttagtatgactgtactccagagtgcacatgaggagagattaaggaaaggggctggagagtcaggcagcacaagttgatgatagtgttgttggtggtggtgatgatggtggtgatgatgaagatgatgatggtggtggtgacgatggtggctaacacatatagagcacttagcgtatgccagacattgttccaagtatttctcatacattatctcttaattttcatggcaatcctttgaggaaggtgctatcattacctcagtttacatatgggaaaaatgttgcagagagatgaagtaacatgccaaagtcacatagcttgtgaaggttccttgtgagccctgagaaatttggctatggagagctaagggtgtttgtttgtttttgagatagagtctcactctgtcgcccaggctagagtgcactggtgtgatgttggctcaccgcaacctccgcctcccaggttcaatctcctgcctcagcctcctgagtagcagggattacaggtgtgtgccaccatgcctggctaatttttgtatttttagtggagatggggtttcaccatgttggccaggctggtctcgaactcctaagctcagatgatccacctgcctcagcctcccaaagtgctgggattacaggcgtgagccacctcacctggccgagccaaggatcttaagtagagcagcaacatgatcagtgtttcagttatttttagctgtataataaaccaccaaaaacgtacttgcctaccaccagcgttttatgatagctcatgattctgtgggttggctggggctcagctgggttgttcttccactagtctggcttttgcagtggcagtaacatggtggatggggatgctagttggggctggatgtctactatcttgaagtttcttttcttttcttttctttttttttttttttttgggacggagtctcgctctgccaccaggctggagtgcagtggcgcgatcttggctcactgcagtctccgcctctcgagttcaagcaattctcctgcctcagactcccgtgtagctgggactacaggcatgcaccagcatgcccagctaattttttgtattttagtagagacagggtttcactgtgttggccaggatgatcttgatctcctgacctcgtgatccatccggctcggcctcccaaagtgctgtgattacaggtgtgagccaccatgcccagccatctattttctttttttttttttttttttgagatggagtctcactctgtcacccaggctggagtgcagtggcatgatctcagcttactgcaacttctgcctccctggttcaagcgattctcccacttcagcctcccgagtagccaggattacaggtacccaccaccacgcccggctaatttttctatttttagtagagatggggtttcaccatgttggccaggctggtctcaaactcctggcctcaagtgatctgcctgcctcggcctcccaaaatgctgagattacaggcatgagccatgccacctggccttaatgttttttcatgtgrctgctatttctctctctatctaaatccttctaggtctttccctgtgaccactctctccagcagagtagcccgtccttggtggctcaagctgccaggccttcttaatgcctaaacctgaaagtcccaggacatcatttcctctgcattgtactggtcaaatggttacaagatttatggaragggtacataggatccatttctggtagaaggaggggcatgtgcatacagggaggggtggaattgtttggccatctttggatactagctatcacagccagatttttatagggaagaatgttctggcagcattatgtagggtgttttgaagagagcaagactaaagacatgatgatgaattatgaagtcatggataattctagttgagttagtcagctagcttctctttttccttctgttactgtggaaagaccagagtaattatgttttaatagtaataataataaaacaataatcctactaacctacatttcttgagcacatactgtgtgccaagcactatggtaagtacatttctccacaatttaatacagttatctcacgagatatatatattcctattttatctttcagaaaactgaggtcaagtgtattagtgtgctaaggctgccataactgtaagtactactgactaggtggtgtaagcaacagacattarttttctcacaattctggatgctaaaagtccaagatcaaggtgtcagcagggttggtgtcttctgaggcttatctccttggcgtgtaggtggccttcttattccttggtcttcacrtagtcttccttcaatgcacatctatgtcctaattttcatactctctttctctttttttttttttgagactgagtctcactctgttgcccaggctagagtgcagtagtgccatcttggctcactgcaacctctgcctcctgggttctagcgattctygtgcctcagcctcctgagtagctgggactacaggcacacgccacaatgcccagctaatttttgyatttttagtagagmtggggtttcaccacgttggccaggctggtctcgaactcctgacctcaagtgatccatctgcctcgggctcccaaagtgctgggattataggcgtgggtcaccgtgcctggccctaattttctcttttttttaaggaaacaggtcatgttggattagggtccacctgaatgaccttattttaattatcttgttaaaagactctgtctccaaattyagtcacattctgaggtactaggagttaggatttcaacatgtgcattttggagacacacaattcagcctataatattatgtaattagtttatcctcatgtagataataggtgggaagtcagactttaacccaaatttgcctgacttcaagctcctgctattaactaccctgtatattattcttacccacaagtgtctttagtttttgccccaagcaggaaaatagcaaggtggaggaggacactgggcctgcatagctttgtatttaggacatagctctttctaacctgaggaacagggcttggattccagttatgtgttctgtgtctgttaacccgtaactcaatcataatgatctttttggaaggacagtgaaaggcagcagggatttgcttgaacccaggagttcaagaccaccctgggaaacatagtgagaccttgtttctacaaaaaataaagaaattagctgggtgcggtggtgcacacctgtagtcccagctaccttggaggctgaggtaggaggatcacttgagtctgggaggttgagtctgcagtaagctgtgattgcaccactgtacgctagcctgggtgacagagcaagaccctgtctcaaaaaacaaaaacaaaaacaaaactaaaggtggtagaggtggcatatcctgatggatatggttccataataggggatgataataatcactaatacttcagggatgtgtgctgtgtgctaggcacaatgttaagtgctttacacatgttattctcacaataaatctatttggtagtattatgtttcctattttacatatggggaaactgaggcagggtggtgmgttaacctgcccaaattcattctgctgataagaagtggcagagccaagcwgagcattcaggcaatctgaatccagaacctgtactcttaactattatgcttccacactgcctctggggacccagtgaagaatgaatatgtaccatttctacaaaaagaatctaagtcagagaagactcattaggcttcccttactctgccaagatggctaccattcctccatctgttttccatcttctagaaatgaatgggataaatggccaataagcacatgaaaagatgttcaacattactaatccctagggaaatgcaaactgaagacacagtgagacaccaccaacatccattaggatgactattatcaaaaacagaaaacaataagcattggcctgtgtgtggagaaactggaacccttgcgcattgctgttggggatgtaaaatggtacagccattatggaaaacagtatgattgttcctcaaaaaattagatataaaatcaccacatgatccagtaatttgacttctgggtatgtacacaaaagaactgaaagtatgaacttgaacaaatatttagatactaatgttcatagcagcattctttgcaataaccaaaaagtggaaacagcaccagacatccatcagtggatgaatggataaagaaaatgtgctctaagtatacaatgaatattattcagcctcaaaaggaaggaattctgataaatacagcaagttggatgaaccttgaagacatgatgttaattgaaataagccaggtacaaaagggtatatgtatrtgattcctcttacatgaagtgtctagattagtcaaatacatagagaaagtggaatagaggttaccagaggctggggaagaggagaatggggagttcgtgtttaatgggtacagagtttcagtttgggatgatgaaaatctccattctggagatggatggtagtgatagttgcacaatgatatgaatatacttaatgtcattgaactgtacacttaaaaatggttaaaatggtaaaatttatgttatgtgtattttaccacgatagaaaaaaagagctaaaaaatggaaatctcttgcccattgtgacattattttccattttccttgtctgtatgtctttttatgcctttgctgtcattttagtgggctctcaggatgaagaaataaatgtgtgtggttaatccaccaatcacaacgaattcccctgaaatgtattttgcatgcctgctacctggatggcacgatgctagagtgtagagatatggtaggttttcatgttgaggagaggaagaaaaacagcaggcacaacacttcttcaaaacttccatgctgtaaaacagttttggttctgaggtcactaaagaatgaagagaatagatttgcagcaatatttaatatatttgctgtcatcttgtactacagtcctaagttgccatagcaacagaccagarcagaaacttcattagaggaagagctccttggattttaaccctgttattcaatcaggcatgagtgatggggaaggccatcagatggcacccataagatcttttactttgataagctgtataattagctaaatctaataagcctttgtaacaagtaaaacaacaaccccaaacctcactttttgcatcttttccagagtcaacaagtagccaaaagatttcctaggagtttccttcgtggaactattcaaagcaatgctagcaataatattggagcatcccattcatcaacgaagggcaggaaggaacactaacagattgatgatagataatagcttattttattggcatttggcatttggaagaagatgcctggcataagcaggtcatcaaataaagarattactgtgtaatagtcaagtctgtgtcacaggtggggggagctgtttctttggagaggagaaggatgccctcccaaacacacacacacacacacacacacacacacacacacacacacacacgaaagcttcaatagcaatttcaatgcaacatgcagtgagttcatattgctaagggaatttagaataaaatgtggtccgaatcaagcaggtgtgggtggtggtcattcccaccaaggatggcttgcaagaattggtgttttttttttgtttgtttgtttgtttttttacttttattttaagttccaggatacatgtgcaggtttgctacataggtaaatgtgtgtcatgggagtttgttttatggttatttcatcactcaagtattaagcctagtacctattagttatttttcttgatcctctccctcctcccaccatccaccatctgataggccccagtgtgtgctgtttccctctatgtgaccatgtgttctcatcatttagctcccacttgtaagtgagaacatgcagtatttggttttctgtttctgcastagtttgctaaggataatggcctccagctccatccatgtccctgcaaaggacatgatctcattctttttttggctgcatagtattctatggtgtgtatggatctcattcttttttatggctgcatagtattccatggtgtataccacattttctttacccagtctatcattgatgggcatttacgttgattccatgtctttgctattggaataatgctgcaacaaatgtatgtgtgcatgtgtatttataagagamtgatttatattcctttgggtatataaccggtaatgggattgttgggttgaatggtgtttctttctttaggtctttgaggaattgctacactgtcttctacaatggttgggctaatttacattcccaccaacagtgtgtgtttctttttctccataacctctccagcatctgttattttttgaatttttaatagtagccattctgactgatgtgagatgatatctcattgtggttttgatttgcatttctctaatgatcaatgctgctgagattttttttcgtatgtttgttggctgcatgtatgtcttcttttgagaagtgtctgttcatgtcctttgcccactttttaatggggttgtttgttttttcttgtaaatttgttacgttccttatagatgctggatattaaacctttgtcggatgcatggtttgcaaaaattttcttccattctttaagtctgtttactctgttgatagtttcttttgttgtgcagaaggtctttagtttaattagatcaggacagcagttttaagcagagttttggaaaaagraagagtcacgtattctcgaggaagacagatatttctgagtcattaagatcttaccatcagtccacatcctcagtttgtccgtttgtgattaagttgtactcatttcaaacatttcccctttaccagccttccaggaggcaccagtcagagcaatcaaatggaatcatctcctggtgaagttacccaggcaagtggatattttcaggtctctttaccaaccctggaaaggccattgttttgttgactcattttcctcccacaaagggtaactttggaatttaactctcctatttacaatacaggtctgttttactgcaaatattcttttattgtgttgctctcccctggatgcaattgtgatatagtcaaacatattttgaaatcagcagtgggtgggttttttttttcattttcttttttctttctttctttctttcttttttttttcagctgctaaatctaaagccctgagcaaggtactgtacagtttacaaagaaragtcagatgcagccccattgtrctcttaagggacaacaatagaagaaatgacagaagacaatcagagattaatgaccagatgaatgatatataccaggtggtcccaacctgagctcccaggctcccaagggtcttagagagcagtaatggggggagaaggaaggggtgcttatgagctatttgcagtacttcaaaaagactaatccaaagagctcatatttgctagatattagatgcacaggctaattaaaagaaaacatcaggtttctttgctcggggctagaaacaccagttaccccatgctgactggaagatctgattggcagttaccgttgtctttgattaataaaacatgagaaaatgaattaattattacttgataaatgtcttttatttgatagacaaaaaacatttcaaagcatgggatttgtgaaatgagaataataaaatgtttgctttgagtgaaaagaataggaatcaatgagatggacaataagtgactattttggaagtgtaaggtggatagagaaggcagagaaggcttcatggagggcagaaaaggaaggactcacccaagcagggttttgaacgatgtataggattgatctatgcagtggttctcaacgtgtggtctcaatcaacagcatcagccccatctgggaactcgttagaaatacaaattcttgggctttgcctactgagtcagaaactcaaaggatgaggcacagccatctgtgttctaacgggccctctgggggattstgatgcacgctacagtttgagaaccaaagatctatgtcattgtttctcaaagtctgagatgcgaatgcaacagtaggtgattccaagaggtatctgttcagcctaaaaacaaaacagaatcactaccaagaaagttatttccttttccaatctcttatgccttctgttaacatcatgggaaaacactcagtttgatcctagtagggctttaatgagaarcagccacatctctttttcttttggacaaagagaagaggctctatttagtttctgggctttggctggcaatagaacttaagttgagtgtgataatttggctcactctgtcttacatttatttttacagttgccttcttttttttggcaagtgaaactaattttccatttgctgaaagggtataaactattttttatgaaaatcttatttatataaaaatctgattcgatttaaagaagaaaggtaaatagtagtgccagaggtatgtagaaatggaaaacataataaagacactgagtgaatgaaatttgtgaaatatatttaagacaacaaatgtgtgtgcgtgtgtgtgtgtgtgtgtgtgtgtgtgtgtgtggtgttgatgcatgaatggatgcatttgtatttgtccttgcttattgattgttttttgggagaatagaccatagatatatacamcattgcagcaaatacaagagcaaggaaaaaagtatccaaataaaatgtattccaggctacaacctgtgacccgttggtggaagcagtgctcagtataacgaaatcctgwacagcaaagggactcacatggtactttgtgccagttgtgccaggattttgtgataccttatctccttaaatacagggctgctgagatgtaatgagagcgggaacacaggttttgtaatctcttcaggcaaataagaaaacgcttgtggaataggtgacaattcgcagcatgctttcaccataccatgttcattgagatgcttttcatcactttactttgagtcagaaagtgccgagatgaattgatcatgtatacacatcaatgtgagcctgcatgctacaggaaggagttattcaggggggaattttattgcactccttttcctcttaatattttatttatcggtaaagtgtgattaaaaagaatataaagggcatcctccaaggcaatgcctctcttttttgacctcagcacataaaacacattttatagcttagcccagaacacacgtacacacacacaccatcaccactaccaccacaacaaaagttttgtgaaataatacacatccttatagcaagatatatactctgagagttttcattctattttagctcattaaaaatgatttcccatcttgctagtggtctcattagctgttaggaaagcattgctctgactcacggctctgggagtttagtgtgcataaggtttacttgcaagcttgttaaaattgtgggtcttgagaattccccccttctaacactcactccctagggatactgattcagtaggtttggggtatagcttggatctgcaagttttgataagtgagttagaggattctgaagagggtagagcttggaccacactttgagaaacactacttgaaaggaaacaataatataaaaaactttatgaaccttgtgatctgaatttggaartccctccattacctactggataaggttcgaatgtcaaatgacatttagggcccctcattgcctagtccctactgagcttttcaggtgcatctccagctccaatcttgctgtccccccacacacctgtcctatgtaaccaaacaacatcagaccattcatcatttacatagcacatactttgatgtggactttcatttcttgcagtatggcagraaagataccttgacttatcctcctgttgwaaacaactaaaaattctggataacatttaaaaccattaaaaatatgttagtgagctagcaagttatgaagaaatactcagaggccaaaaatgaagaaaggtaagcagggccccaaactggcttgtgtttgcttcatagacacttgctgaactgggtgatggtggttttttttttaagaccgagtcttgctctgwcgcccaggctggagtgcagtggcacaatctcagctcgctgcaacccctgcctcctgagttcaarcgattctcctgtctcagcctcctgagtagctgggactacagttgtttaccatgacacccggctaatttttgtatttttagtagagacagggtttcttcaccatgttggccaggctggtctcaaactcctgacctcaagtgatctgcctgcctcagcctcccaaagtgctggtattacaggcatgagccaccattcccagcctgaactgggtgagttttgagctttggtttttttcattgtctcagttacgggagacagaagatgaagcccagaacctgtccaaggtaagggtctaataggacccctcccataaagttatgtccttaaatagccaagtgtaatggtaatttagtgtgagggtgatttggaaataaatctgtcacctaaaggataaaaacaattgtctgtcttgaacatcggggctggttgtagggcccccccaaaaaaaatctctgagaatttgtaactacaagtaaactgttacgaggatctataacatgaattcacacaaccaaagtgatgttagactagtagtgttcttaagatgcctagcagaaacaaatgcatatcccatagaagaacttgtcttttcccagatctcaaggaattcattttgatgaagttttaagagatttcaattcatggtgaaaaattacagggaagcaaggcaacaagtattgagccagcagaaacaacagatagcagaatcagatccatggagactgcagatggtataattatcagtcacagaatataaaagaagtattcgaatatgttaaaagaaatcagaaataaaattgtgaataaagaattaaactaggtaaactaggccaggcatgctggctcacgcctgtaatcccagcgctttgggaggctgaggtgggtggatcacttgaggtcaggggttctagactaccatgatcaacgtggtaaaaccccatctctactaaaaaatacaaaaaattagccaggcttgatggcgcatgcctgtagtcccggctacttgggaggctgaggcaggagaatcgcttgaatccaggaggtggaggttgcagttagccaagatcacgccactgaactccaccttgggtgacagagcgagactccatctgaaaaaaagaaagaattaaactggaaaaatgacaatgtgtggccaggcatagtggctcatacctgtaatcccagcactttgggaggctgaggtaagagaatcacttgagcccaggagttcaagaccagcctgggcaaaatagtggaacccctgtctctacaaaaaatttaaaaaattagctgggtgtggtgacatgcactatagtcccaactacttgggaggctgagacaggaggattacttgagcccaggagttggaggctgcagtaagctctgatcacacactgtactccagcctgggtgacagagtgagamcttgtctaaaaaaaaaaaaaagacaaagtgaattttataaaaataacttctacaaatgaaaaattatagattccacagttaattagacaagttgagaagagaattagtaacctaggggagagttctggaacaatatctagagctctggaagatagaatgaaacaaggctggrtgtggtggctcatgcctgcaatcccagcactttgggaggctgaggtgggcagatcatccgagatcaggagtttgagactagactggctaacatggtgaaacccgtctctactaaaaatatgaaaattagccaggtgtggtggtgtgtgcctgtaatcctagctacttgggaggctgaggcaggataatcacttgaacctgggaggcagaggttgcagtgagccgaggctgcgctattgcactccagtctaggcaacaagaagtgaaactctgtctccaaagaaaaaaaaaaaaaaaaaaacaaagatagaatgaaacaattcaatattgctttattgaatattgaaatgtataattagtattccataagaagaggagacaaagaatgtggagataatatttgaacaggtagtggttaagaatttttcagtactggtgaaagatacctgtccatacattcaggaagcccagtaaatctcaagtaagatagattaaaaaaaaattcacacctacatacatcacaaatgaaacttcagaacatcaagacaaagaaaagatcttaaagcaatcagagtgaaagacagatgacctctaaagaacgatgattattctgacagttgtcttctcaatggcaataatacaaaccactaatgagtcttaaaaaaattaaaattttcatgtatttagggggtacaagtgcaggtttcttgcatatatgtattgtataatgttgaagtctgggcttttagtgtacccatcactcgaatagtgaacattgtaccyaatacacagtttttcaacgcttactgcacctcaccctcctgccttttataggctccactgcctattatttcactctgtgagttcatgtgtggccattgtttagctcccacttctaagtgagaacatgggagaaaccactaaaatatcttacatatgctaagggaaaatcactgtgaatgtaggattatatatgcaacaaaaatattattcaccaggaagtggaaaaacattttcaggcaaaatctgagagaactcgtcaccagtagactctttccaagggaaattctaaagaatatactttaagcagaaggaggactaaaatgcaagaagaaatgaggatcaaaagagtgttaatgtgctggggtgtggtggttcacgcctgtcatcccagcagttcacgagggtgaggtgggaggatcgcttgagccaaggtgttcaagaccagcctgggcaacatggtgaaaccctgtctctactaaaactacaaaaattagccaggcatggtggcacctgcctgtagtcccaactaatcaggaggctgaggtaggaagattgcttgagcccaggaggtcgaggctgcagtgagccataaatgcagtactccaatccagcctgggtgacagarctagaccctgtcccaaaaaaaaaaaaaaaaaaaaaaaaagagtgtcagtgtgtggacaaggcaaacgagtattacctctagaagataataacgatgtcctgaaagattaaaaaaacacaagatagcctaggggcggtggctcacgcctgtaatcccagcactttgggaggctgaggcaggcagatcatgaggtcaggagatcgagaccatcctggctaacacagtgaraccccgtctctactaaaaatacgaaaaattagccgggtgtggtggcgggcgcctgtagtcccagctactcaggaggctgaggcaggagaatggcgggaacccgggaggcgaagcttgtagtgagccgagatcgcgccactgcactccagcctgggcgacagagcgagactccgtctcaaaaacaacaacaacaacaacgacaaaaacaaaataaataaagtgactaaagttaggagtcatagtctttatttttcatggggttatttttaaggtactgatcaatcttggatttaaaaaaaaatagagatggggtcttgctgtgttgcccaggctggtctggaactcctggtctcaagtgatcctcccacctcagcctcccaaagttcagggattataggtgtgagccaccgtgcccagccaaccttggattttggtatgtatccatgttaacatttctaaaatagtgtgtgttggggggcatgctggaagaaatctttcctcacccattaccaggttcaaggttgaggcctctataacaaaagacagataaacgagaagaaagtatacagatctattcattataagtgttgtgtgacacaggagccttcagaaatgaagaccaagacacagataaatgtgtgtgtgtgtgtgtgtgtgtgtgtgtgtgtgtgtgtgtgtttgagatagggtctcgctttgtcacccaggytggagtgcagtggcatgatcacagctcactgcagccatgatctcccaggctcaggcagtctactcacttcagcctcccagcagctgggactacaggtgcacgtcactaagctgagctaatttttaaactttgtttttagtagagaagagatctcactgtattgcccaggctggtctcttgggattgagtttaatcratcctcccacctcagcctcccaraatgctgggattacaggagtgagctattgcacctggccaacttctgtattttaatgcttaggtttgtttttcatttaacttttttttttttttttgaggtggggcgtcactatgttgcccaggctggactttgaataactcctaggctcaagtaatctgcctgcctcagcttcctgagtagttgggactacaggcacatgccaccacaactggttttatgcttaggtttgatgaagagtggacagatacggacaagtatgrttgtggaacaagtaagtgtgagatctaatggtaataaactgggggaaacttagcaaggcctgtttgttcagattcttttctgcatccctgtgtcttcagagatgaggacattttttttcctccaggtatagggaggatacctctcaaatatgagtctcctcacaggtaggttggagaattcttttatggcctgctttagaagagaaaagcggggtcagagagaccttcctgcttctgctgttttctcaaatgccaaggtgtcatattttagagcagcaagttctgagccccatcattaatcactaaaacaatagaatggtggccatctcttcgctacacagcctgccactctaacgtcagtggaccctggtgcttcggtctgtgcttctggacagtaggatggtctgcccacatagggagaagtattttagccctggttttgttgggaattgccagtatgtgataacaatgaaagcatataaacttctagtggattttgtcctcttcactcccctaactcttgcactgttcctagattttcactgattacttttccctttccaagtagtgatccctgtgaggtctggttattcagtttgcagatatctggctcttagcttcttttgcttaatcttcttcaggtcatttccttaatcaacagcattaccttagggcagtggttctaaaagtatgtgccacagacccctggagttccccaaggtcctgtcgaggtcctcaagatcagacccatttttttttttttttttttttgaggcagactctcattctattgcccaggctggagtgcagtggtgtgatcttggctcactgcagcctcaacttctcaggctcaagtgatcctcctgtgtcagtctcccgagtagctgggactactacaggtgcatgacaccatgcccagataatttttgtattttttgtagtgatgggattttatcacgttgttcaggctggtctcaaactcctgagctcaaataatccatccgatcagccttctaaaatgttgggattacaggcatgtaccaccacacccagcccagaactatttttatattaatactaagaccattacttgccatttcactgtgttgactttcgcacgaatggtgcaaaagcaatggtagctaaagcttctggcaccttagacagcaaggtggtgacaccaaactttactagtagtcattgtattctttgccacacacacgtggtaaaacaaaacaaaaacctagtttcacctaagaatgtccttgacaaagcagtacacattattaatttattaaatctcaacttttaggcacacatcttttacacatctttttggtattttatgtcatgagataagaaatacacataaagcacttgtgtggcataccgaagtaggatggttgtttcaggaagagcacttgtgtgactgttgagttgtgagctcaactaccagctttttttttttattaaacaccatttttttttaactcgggagaatgagtgacatacaactctaagagaagatttgtgcttygaaggaaaactgcattgtttgttgcacatccttagttgattctgattctatgggagctattttacaactctgttaagttgtagataactgatggcaatgcaaaataattcttgtctataaatgttaggcaaatgaattctgcctggtggagggacagcccttctccatccagtaaaaaagccagtcttgtgtccatgtgtactatcgttttaacatttcaaaattccttaagaatttgtgcttgtttggtttctcctttgaactggtttaaatatctgcctggttccctcattatgagttttaaaaaactttaacatgtgttcattttgtgtcagtataagagtcatggttttacctttttttcttttttttaaaaaaattatcttttaacaaagaccgtaattgctctagcttgggtatttagcagaaaatttctcaaaaataattaaaatgagcctgtcaaggaaaacaactgacagtatttgttaccaaagatcccattcaagctttcaaatgaaaattagaatatctgctgccctgagcctgacagcttcccaatacttaaagacttaaattatgagattggtggtgatgttagtgaatgtgatgttggataataaaatgtgacagtgtttggaagatctgcataattcagtgagccaatattttccaatatcatccaatgcatgatgttacaaaatcatgcataagaaaaaatccattcaaagtacatgataggccaatagattttaatgttaacrgagtatgaaaagttcactgatatggtttcagattctacatgcaactagtctttaagaaactaccagcctggtgcggtggctcatgcctgtaatcccagcacttygggaggccgagggggggtggatcacctgaggtcaggggttcaagaccagcctgggcaacatggagaaaccccgtctctacaacaatagaaaaaactagccaggtataatggcgggtgcctctaatcccagctacttgggaggctgaggcgggagaatcgcttgaacccaggaggcagacagagattgcagtgaaccgagatcctgccattgcactccagcctgagtgacagggtgagactccttctcaaaacaaacaaaaaaaagaaactaccacttgctgaattttggcatagtgtcaaagtagaaaattcacaattatctgaaaagactattacaatattccttccctttccaactatatttatctgtgtgagatcatattttcttcatacccttattcaatcaaaacaatatatcatggctgggcacagtgactcactcctgtaatcccagcactttgggaggctgaggtgggcgaatcacttgaggtcaggagttcgagaccagcttggccaaaccctgtctctactaaaaatacaaaaattagccaggcatggtagtgggcacctgtaatcccagctacttgggaggctgaggcaggagaatcgcttgaacctgggaggcagaggttgcagtgagctgagatctcaccactgcactccagcctgggcgacagagtaagactctgtcccaaaagaaaacaaaaacaaaaacaaaaacaaatatatcataacagcttgaatggagaagcagaaatgagaataaagctctcctctattaagccagacattaaagagatttgcataaatgtaaaacaatgctatgcttcttattaaatatacatttycttaaattttggaagatacttatattttataaaatatgtaatgttcacatgtaatgagttaattgttatcttaaagtaaactaataagtagttttaaaagtcttagttttaatttttaatttggtaactattgatagataaaacctcataaacaaaatctttttgggagtcttcaataatatttaagtgttgaagtcctgagatcaaaatgtttgagaaccatgaccttagtggaaaagattgttaaatttgagctggttgaatggtcggtttatgtcagaagacagggtttggaaagaggtaggattatggattaaggtaaagttgaattcccttctgtattgtgcagaagtcattggctttgccattaataataataacattatcaggttgagcacagtggctcatgcctgtagtcccagcactttgggaggttgaggtgggcggrtcacttgaggtttgagaccagcctggccaacatagcgaaaccctgtctctactaaaaatacaaaaaytagccaggcgtggtggtgcatgcctgtagtcccaactacttgggagactgaggcatgagaatcgctkgaacccggatggtggaggttgcagtgagcccagatcatgccactgctctccagcctgggcaacagagcaagaccctgtctcaaacaaacaaacaaacaaacaaaagtatctactaattggggcrcgtattgtgcgctaattacactacataaattactttgtttattcttacaccaacattaaaaggtttgccttttcataataatagtaataataataataataawaagtaagtacatctaggtccaaaataaacccagattcaaagaagttgagtgacttgcccagagtctaacaaccaagaggggatccttattttgttcttctccatagccagtagccttaaccaggagtccacattatctcctgattctgagtggccatggtcaagtctaattttcatgagtctgttttccgatctgtaaaacaaatgggatcagagagagtttcacctaccacgggccaagtcctcagccctgtatgcagagcatattgcacattcccttgccttcaggaagctcccagtaggatgttctttaaaagctggccatgctgcctgatactgtaattttcataacccatattcttaatgctatcactgtgagtcctgggatttcagtggctttgtggttggagagtgaagaaacctaagtagagaatgcagaggctgccagtttattagtgtggagaggcgagatagcaatccagtaatttatttattttgccactgaatcctagaggccgggaactagaaacctaagcataaagcctccactgctggaagactcccaccmcccccaacaattcaggaattgctttcagccaacattacctctgctttctgagcacaagccaggctattgtgctggaaataatcggtgttagtcttattggagtggcttgcgttgccatagttactatttgggttctgtgcacctaaaatttcaagtatttaacaggcaaaaagagttagcttatttttttctttttgcctttggaaaatcagattggagagaaagcagattctgcatcctattaaatgtctgtgtcgagtgggtactgtcatatccggcattgcagagtcatagttaactctcaagcagtgaaaagcagcttggccgtggccttgaaaaaaggggttatcagcatcctgctgaggacccaccgttactgcctcctgatggatggaaaygcagattgtcattgctggttgtgcagctaaagaaattgggcgaggcagctggttatttatgacggagcaacacagagctggtcagtagtttccccagttgccaccacgctgtacatggcaacctgccccccagctctgaaggctgggacagaagtttgcaaagagatgggaaggggaggtgggcacaaactggtgtgtgcgtgggggcggcagcacagcagtagcagaaagggagcaaacttggccactcagcaccttgagtgtgcaacacatgaagactctgctttcgaagctatcatgtttattcgtgctgtctgtttgcctgtctggttcacaggctctgaatcggcccacagtggtgcctagaaatagtcccctttgcttggtcgccatgagtcagactggtctttatgtggctgtctcctaggaacccaaagctatgccacatggctggaagctgtgtttacaagcttttcatccgtcttccttaacttgtggtcgctatggtttcctttgcctgctgggctggccctttaagggggacaagctgtccactcaaccaaatgccagaggcactggctccaatagcttgggtcttttggctatgggcttaaccatatctcatcacctgctcattctgagccccaaacttctcccctggtgaggctgaccttgacctttgccctgtcatgtgtccattgtggggtctgccaccttactgcctgtcctggcaccctctgcatttgccacgatcagggtgtttgtggtcgggtgcagtggctcacccctgtaatcccagcactttgggaggccgaggcgggtggatcatgaggtcaggagtttgagaccagcttggtcaagatggtgaaaccccgtctctactaaaaacaaagaaaattagctgggtgtggtggtgggcacctgtaatcccaggtactcgggaggctgaggcaggagaattgcttgaacccgggaggttgaggtggctgygagccgagattgcgccactgcactccagcctgggcaacagagtgagactccatctcaaaaaaaaaaaaaaaaaaaaaatcagggtattcgttttgcttcccgttggactgacttcttagtagcttggattttgctcagacagagagccctgtctcctctgccatggtcataatgacttacttagacacagggctcatgttcacttggaggtgccatcctatcctctgtcactttgtcatggacacctgtttatccccttttcaggtaatagcactttgtgttttggggatctgccccattctcagcttataggtgtttctagagggrcttatcccacccctcttcgatgactgatgcagggatgaacacataatgcaagccaggccaatgacaattaatcctggaacttttgctaggagaaagaagtttttttctctgtggttgtttagggtattggatatatccccccctttttttttccctgttgcccaggttggagtgcaatggcgcagtcttggcctcccaggctcaagcgattcttgtgtctcagcctcccaagtagttaggattacagatgtgcaccaccacgcccggccagggtattggatgtaatcctgatgtgctgggtgatgtggaggtgggggctactatttaaaagagaatcaatcaacacacaggagaacagagctaagagatcaaaagacagcctgtgacttgacattgttcacatgcctcaactatagtccagatacctgagtcagaacaaactcccttttaatgccaatgcctattcaggttgggctttctgtcacttgcaactgaaagagtctggtacatccccattcacgaggacaccaaggttcagagaagtgaggtaatctacccaggatacccggctgctgtgatttgaccctgtttctcttggctcccatgactgtgtctctcccactatgcctactttaaatagtaatcttacgtttgtgacacatttcacaagacacaaagcactttctsgtgacatacaccaccacaacaaattctactgctttcattgtgtgcttccagcacagggctgttattattattactagacacacaatattatcaatctcattttccagatgagggcattgagagttggtcacatgcacacttggctggtgagtggcaagtgggactctctgcttcaaggttgacttaatattcttgccatttccctacatcacttcctgggtatgccatggagagtaattgcctcagctggtggcctcttgtcccttgcttttcccccagggagtcttgacccgtgcatatcttggaggtagttgcttttggaggaggcctgacacaatggaaagggcctgaggcctggtgatcaaacagactcaagtttagatcttgcttcccccacttactggctttgtaactgacttagtccactcagactgctataagaaaataccataaactgggtggctaataaacaacaaccatgtatttctcatagctccttaggctgggaagtccaagaycaagatgcctgcagattccgtgtctggtgagggtctgctttccggttcatagatggcatcttccagctgtgtcctcacatggtggaagggacaagacagcttgggcctcttttataaaggcactaatcccattcatgagggcttcacccccttgagctaatcttttccccmaaggtcctatctcctaatactatcatcttattaggagtgttgggatttcaacatacacattttggaggggacacaaatatttatttatttttatttttatgtttgacacagagtcttactctgtcacccaggctgcagtgtagtggcgccatctcaactcactgcaaccttcacattcccaggctcaagcaattctcctgccttggcctttcaagtagctgggattacaggtgtgtgccaccacacctggctaatttttttttttttttttttttttgagatggcttctcactctgtcatccaggctagagtgcagtggtgtgatctcggttcactgcaacctccgcctcccgggttcaagcaattctcctgcctcagcctcccaagtagctgggattacagtagcataccactatgcccagctaatttttgtatttttttttttttagtagagatggggacttgccatgttggccaagctggtctccaactcctgacctcaagtgatctgctcgcctyggcctcccaaactgctgggattacaggcgtaagccaccatgcccggcctggtatacaaatatttagaacatagcagtaaccgtgggcamatcacttgctttatmtgaactcttatttcctcttctgtaaaacctatgagtcagagagaataatgtcttgcaaggtttttgtgagcattaaatgaagacaatgcatgtgagttggaataacatccacaattaatattagttgagcatttatgacatgtattgactcacttaaccctcaagataatcttttataataggtattattcttatctccatatgctatatgagaaaatgaggcacacagaggttaagtgacttgcccaaggccacatttcttgtgaatggctgagcagtattcaacccaaacgtgctggttaagagctctgaatcacagcattgtgacgcacctagctcagtgctgagcgcagggtaagtgctcagataatgggagaccctttctccattccaattccatttctttggagaccttagcatccagtatttaggatagaattgaagcagtggaactagtgttgaagagggccacatttgatggtacagattagagcagggctggaagcccaatcagggaggtaataatggtmaaaattcggctggatgcggtggcttacgcctgtaattctagcactttgggaggccaaggtgggcggatcacaaagtcaggagttcaagaccagtctggtcaacatagtgaaaccctgtctctactaaaaatacaaaaaattagccaggtgtggtggtgtgtgcctataatcccagctactcaggaggctgaggcaggagaatcgagtgaaccttggaggcagaggttgcagtgagmcgagattgcgccattgcacttcagcctgggcgacagtgggagactccatctcaaaaaaaaaaaaaaacaaacagtcaaaaatctatgtagatcagagatcaggaagacagtcagggtctggatgccaatgaaggagggtccagcaagacaggtgggctcaggaattaaagactcacaggaacaggaaaagctaactaggggaccccttagtcaccagaggctttttatctcagccccagagctttgctgtggtttctgttaagccaggaacccattaaagagtggctgacctgggctctgcagaagaaggggttaggattaagggaggctatggcttctggtgagcatctgtgttttgacattgactaagtcttgatggtgataatcttgattcattcattcaatacatgtttataacccartggagatccttccttccttccttccractttttttttgtacagacagggtcttgctatgttgcccaggcttgtctcaaactcctggctccaggtgatccccctgcctcagcctctggtagtgttgggattacaggtgtgagccaccatgactggctgagaaacttatttttttagcagtagattctaccctcccttagtatctgcctcacctttcaggagacctgtggaggtgggttgtattagtttgttttcatgctgctgataaagacatacctgaaactgggtaatttttaaagaaaaagaggttgaatggactcacagttccacrtgatggggtaggcctcacaatcatgacagagggcaaaaggcacatcttacatggcagcaggtaagagagaatgagagccaagtgaaaggggaaagaaaccccttataaaaccatcacatgtcgtgagccttatttactaccaggaggacagtatgggggaaactgcccccatgattcaattatctcccaccacatccctcccacaacatatgggaattatgggagctacaattcaaggtgagatttgggtggggacacagccaaaccatatcatgggtgaacatttggatctactgcttgggtaagaatgagtgtgagcattaggtttgaagagcagtggatagatggttgtactccattaaccagacaccaggctcttatttggctgagtgggttggcactctgaggctgaaaatggaatagttttgagacagtagaacatattttttagaggctgagatagagagacaggaagagaaggaggaaaaacaaagtagctggcagagagaggactttgagggaaaagaagataaatatttaaaggaagttttatgaagttttcccatgttatgcacaatgtaaactttctttcttgtctccccaagaatttttcagtaaaatagacatttcttgttaatgttgatagggagaagaggcagggaaactctgggcagaagagggcaggtccctggtgagggttccaccctcaagcctggaaccttggctcaaagtgagaacttacatccctgttttcctgcttgaatgttgccttttccaaaaccacccatggcctgtctcacccctccatcctgtgcccataaaatccccaggctcagctggcagagagaggagaagcagctggatgtcagagactatggctggacattggagagaagtggcttgacttcagagggacagcttgatgatgtagctttggagaaaagttcagctgggaatggccagatttcaggggaagattaccttcccactctgtcaccttttcagctccccttcccattgaaagccactttcatcagcaataaaatccccctcatttactaccttcaatttgtttgtgcaacctcattcctcctggatgccagacaagaaattgggtgcaggtgtaaaaggctgtcacactgaccctccaccgagctgttaacacttaagctgtcctcagacgacaaagctaaaagggcactgtaacgctccttctggggcttcaggggtcacaggcacttccccctagatgctgctgtggggccacatgaagttttgcttctgctggtgcccaaaagtactcgccctggctcctgcacccactcacctgcatgctccccctcccatgatgggtgaagcccagcaggtctgagtgagtggaattcactcctgtcagtgctgaagcagctggctagttccactgcccctgaactccagttcccacttgtgaaggggtcagggaaatattctgcttcaatgtgttgtagagtttaatttcttttgaggacaccttgaaatacttagtgggattggaatgaacacaaagtcacccaccaggattttgccacattgggtcacatatttttggggcacctcctatgtaccagayatgatgccaggtactgaggtgacaaagatagctaggacatggtctctgctctcaagaagtgtaaagtcttttgggagagcaggtgtggaaacagattagagtggaagacctttaatctagaaggctgaacatcagagttattctaaaaggatattaaaaatgatcacttgcataaagacagacatatagaccaatggaatacaattgagagcccagaaataagcacacacgtatatggtctaatgatttttaacaagggtgccaagaacattcagtggagacagaataatcttttaacaaatggttttggaaaaactggacatccacatgcaaaaaaaaaaaaaatgaagttgaacccttaccttacactatatacaaaaattaactccaaatagttcaaagacttcaatgtaagacctaaaacgataaagctcttagagaaaagtaggggaagccttcatgacattggattttgcagtgatttcttggctatgacaccaaaagcacagacagcaaaagaaaaaataaatyggactacatcaaaatttaaaacttttgtgcatcaarggacataatcagagtgaaaaggcaatcatggagtggggaagatatttgcaaatcttatgtctgagaggggttaatatctggcttatataaagaactcctaaaactcagcaatgacaaaaacaaacgactggatcaaaaatttggcaaaggacttggatagacattttttgaaagaagatacataaatgtccaataagcacatgaaaagatgctcaacatcacaaattaatagggaaatgaaaattaaaaccacaataagacagggttctctaacccctgttaggaactgggccgcagagcagaaggtgactggctggtgagtgagcattaccacccaagctccacctcctatcagatcagccatggcatcagattctcataggagcgcaaaccctattgtgaactgcacatgtgagggatccaggttgcgtgccccttatcagaatctaactaatacctgatgatctgaggtggaacagtttaatcccaaaaccatctccttgcaacctcgtccttggaaaagttgtcttccgtgaaacccgtccctggtgccaaaaaggttgggaaccactgcaataagatacaaccttacacccattaggatgggtactatccaaaacaaacaaatagacactcccctgcccccaaaataataagtgttagtgaggaagtggagaaattgaaactcttgtgtattgttagtgtgaatataaaatggagcagctactgtggaaaaaagtacttaagttcctaaaaaaaaaataaacagaattattatatgatccagtaatttcacttctaggtatatacaaaaaataattaaaagcagagactccaacaaatagttatamcaatattcatagcagtattactcataatagccaaaaggtaaaagcaactcaagtgtccattgatgtatcaaattttgttttaaaacttgatacatatatacattagaatattattcatccttaaagaggaaggaaactctgacccatgctaccacatggatgaaccttatgaacattgtgctgagtgaaataagcgagtcacaaaaagacgaatactgtaagattccatacttgtatgaaatacctagagtagtcaaattcatggaaacagaaagtagaatggaggctaccaggagctggggtaggaaggatgggaagtttaggggatccagagtttcagtttgggatgatgaaaaagttcctgagatggatggtggtgctggctgcrcaacaatgtgaatggcttaatgccaaagacctgtacacttaaaaatgattgagatggtagatcttgtrtgtattttaccacaagttttagaaatttaaaaaactttaaaaagtgattactcacttaaaaatcacaccaccgtaacgactgacaacattttctactacgaagggatggtgcaatccagggggctgtgaatgacctgtgggtaaggtcctagctgcccagtaaaggcaggttgtagtggacaatgtccaaacattgcaacagatttgtagcaactgaagttgtaaccggttttggacaytcatctgttttggcaggtcatatgactttagtttgatcrttgtggtcttttgttattaagatagccatattccagaacgactataattccagaatggagcaggtctcagaccttccatgcacattatcttctgttgtgatgacaatgtgagaaatgccataaaagatagagataggtgcagggtacctatttgttcattcattcttgagacaggacagaggtgtaaattactgcttctttgctacatcctctgccacgctgtgcttttttcttagtgcatcatgctttggctgtagggtttttcatcttattaatggggcactttatgttcaatggggaagctaattttcctaagttgggttccctggagaacagaccccaaagtggagatctgtgcacaggtttatgagacacctctcagcaacarcaactgtgagggagtgagggtggcaggcttggaagaggcctcagccaatcccatgggaagttctgaaaccgggagkgtccttctgaattatccacagggaggtaagggggtgggatcctctgccccatggtctcggacataggctgtcctggggagggagaatgatctggggtgagataatgctccttggctcaggacagtgcttgaggagtgttttagccatgagacctcaatagccaacactttatttatttatttttttgagacagggtctcgctctattgcccaggctggagtgcggtggtgtgatcttggctcactgcaacctctgcctccctggttcaagcgattcttgtgcctcagcctcccaggtagctgggattacaggcgcatgccaccaggcctggctaagttttgtactttcaggtagaaacggggttttgccatgttttccaggctgtcttgaactcctggcctcaagtgatctgcccgccttggcctcccaaagtgttgggattacagtcacgagccactgggcccggctgatagccaacactttaggcatttgagggagtgtgagccttagtccaaaagcccaggcaatgaaagaaaaacaaaacaaaaatcctctgcagggggatctgggcagcacagcatacacatacatgctgtaccagtcttctgcttttgtcttcagcggttattggtaccagangtaaggcatttccgggaaaggcagcacaraacagtaccagaagcataaacaggaattgacttaaaaaaaaaaatctcttgcttaaataataacagtaaaaatggaaaaaagaaggatgaaactcccacctcccttctgaattacttgttttcacttgctgtgttatkgtctggtcaatatccatctgtactcatcaattttacacacttatgattataggtattgtgtatatgtgtgtatataatatttgtattatgtgtatgtatataaaagtgatacttyttttgctgatcacagtgagtttttttaaatgagttaaatttgatagagagaaacakggatattaaatgcacaagtmgattagttttgataagcgtatgcacttgggtaactaccaccccagtcaaggtaaacatttccattactccagatggttcccttgggaccctttctggtcaatctccacccccataggccactattgttctgatttctatcgccatggattagtgttgtctgtttttgaattttacattaaaggaagcagagaggattgactcttttgatacacatatatgtaaagattgacttttttctttccataatactactaatgtgttttttctaattataaaatatgtatacttttattatcaatattacacaatacagattaatattatgcagccttcaaaacaactgtgctcagacccatttcctataggtgtccactgaattttggtatattttcttacagtggttctcaaagtctagtctccagactagcaatgtcagcagaacccagaaagcaaaattttcagccccaccccagatctactaaatcagaaactctgggggtgtagactagccatgtggtttaagaagccctccagatgttcctgayacatcagtatttgagaaccgtttccttatgatttcctccctccctcccttcctccttccttccttccttccttttcccttcctccctctgtccctccctttcttccttccttgccacatttttgtattctactttttcatatgacaccttattagaaacattactatgccatgacaggtaatgagttaatttattcagactaggaaaaactggtgtggtatttaagtgtagaaatcagggtagatatggcctgattggccttttgccctctcttgggataactgtttcccagcctgaccacatttgtgaaaggcctccttactccctctcatccccacacagcatgaggatgctggaaatgtttctgggtggagaggttcaattgtatctgggaagacttacaaataaaccttgtctcatttatagcaggtgaataagaactttgwccaggcarataacacagaaggctggcacttgtggttcccaaataagaattggtcttgaggagtctaggtgggtggacatggatgtgccagtttcaggggagacatcctgaaggaaagatcactatgtggctctgcaggagacactgtctgggtccttggttgtggtagaacaaggacyccttctcttgcctcataatacagcactgccggggagcactgtgtccactagtggactccagactggcaggcctgactttggtcctccttgggaagtgcctattgactcttcttgttttsagatgacatttgttaggctgaaagaggagaagggactttatccacaatcatccccagagtatagccttccacacaaaggctttctattcatcctgcaagaaatgacctttcaagatatgacctgtgagcacccagagattggggaagtgacttgcccaaggtcacacagtgggcgtgttccggccaacactgagattccaatcctaatcacctaactccaaattctgccgtctttccactctgtggtgctgcctcctggagcaggcaaggttttgttcttcttcacagtggacagggcagtaggaaaagggacagcgttggatgtctcagggagcaagaggcacctatatcagaacttctggggaaaaggaaggaagagaacrtgaaatgcagtgtgacgtagtgcaaaaatgagtgggttctggggccagtgtgacctgatttasaatcagagctgaggttcttacgggtcgtgtgatgtatcagttattgattgctgtgtaccaaattacccttaaacttagcagcttgaaaaaacccacacatttgttatctcagagtttttgtggatcaggaatccaggtttgccttacctgggtcctcggcttgtgggtctcttacaagactgcttttgatgtgttggctggtgcctggtgctgaggtctcatatgaaggcttaactagaatgatgctgtcttagtctccccaggcttctaaaacaagatgccatagactgggtggcttaaacagcagacatttcttttgttacaactttggagcctctcagtcggaatttagaggccagctaggttctggtgaaggctgtctcttcctggtttatagacaattgcctccttactgtgtcctcatatggcagagagaagagagaggggggaagagagagagagaaagagagagagagagagagagagagagactcttctctctggtctcttcttataagggcactaatcccatcctgaggctccaacctcatgacctcatctaaccctaattatctcccagaggccctatctccaaataccatcacaytgggggttatggcttcaacatgtgaatctggggaggacacagctctgtccatggcagatctgcttccaggctgactcacatggttggtggcaggattcagtttctcctgggttgttggatgagggcctcgggtccttgcttcctgttggtctgaggccatccttgcttccttccacaggggtctccccagcatggcagatgatttaactcttctgaatcccttcaacccttttaacatgtaaaacagcaatagctgtagctatcttagagttgtcatagggattccctgagataatgtagaaaatggccttgcacagaaaacggcaccttgttggggcttcctaaattgcaactgttattcccattattataatttttagggtacctgatactcagaagcttggctgttgtccagacagcatatggagatatacccctgtcccctgctataacacaaagacttccccaggtgaaggacaatttctaagtaccagagaaaatacatctgagactacgtgactggcagttcccagaggtgtgacctgggaaatacaatggtcgcatttattgtcccttcatgataaaaacaggactcagcttctcagagtaggccccagagtgttcttcacatccttgggaacaaacccaactgcaaccgctgcctgyggaacagcctcaactgcacccacarcatccagaacagaccccagctgcccccacggcatccagaacagaccccaactgaaaccactgcatgtggcacagcatgaactctctaggaagtttaacttgagccacttttgtagttgatctcatctctcaaccatcatttctggtttttatcccatatttgttaatatctgaaagcatctctgtctgctgttttcccagccaatcctgggcacaattaacaaggtgttttccagaggccttgggagctatatctttctcagtcatcatttggggccattacagggggaagtagaagtcttattgctgtgggataccatagatgtcctaaatcctcgctgggtagaaacaagaccagactgaatgtctgttctgaattatctttctctgcttaaatggagtccaggaggaacccttacttgcaaaatatatattattcagcccgatgctgcgttcatttcctaaaagagattgggtccaaataacactttaattgaattcagtttcttgacctaacactgacttggttctccctcctgtgtcttccaacattagacagaggaggaggaggaggaggaatagacaaagcgattcacatggatttataggccaagccactcacttccacattccataaagcccaaatgactgtataggaaacagctgcagtatttattggggcctggtaaggcctcattaccatcccacctcctcacagsgggtattgcctccaaatggagtgcagtggagggagtaattgactctgctgccctggcacctggtgtttctgccaaatgcctaaggtcagtgctgcaaaaaaaaacycaaaaaccaaaaccmaamcaaaacaaaacaaaaaaaccggatggaaggaggcctccagtgagagtggggagtggagcygagagatgatcagaagggatttcatttgtttgtatttttcttccctcacataaggaatgtttattgatcacctattatatgtcaggcatagttgtaggcactggggatacaagaacagacatggctcctgctgtcttagaacagacactctaggtggctctgcctaaacaatgatcccctgccacatgtggctatttagattttttttttttaattattatactttaagttctgggatacatgtgcagaacatgcaggtttgttatgtaggtacacatgtgccatggtggtttgctgcaccygtcaacctgtcatctacattaggtatttctcctaatgctatccctttccttgccccccatgccatgacaggccccagcatgtgatgttcctctccctgtgtccatatgttctcattgttcaactcccacttatgagtgagaacatgtggtgtttgcttttctgttcctgtgttagtttgctgagaatgatggtttccagcttcatccatgtccctgcaaaggacatgaactcattcttttttatggctgcatagtattctgtggtgtatatgtgctacattttctttatccagtctatcattgatgagcatttgggttggttccaagtctttgctatcgtgaatagtgcctcaataaatatacgtgtgcatgtgtctttatcgtggaatgatttataatcctttgggtatatacccagtaatgagattgctgggttaaatggtatttctggatctagatccttgaggaatcgccacactgtcttccacaatggttgaactaatttacactcccaccaacagtgtaaaagtgttcttatttctccacatcctctccagcatctgttgtttcctgactttttaatgatccccattctaactggtgtgagatggtatctcattgtggttttgatttgcatttctctaatgaccagtgatgatgagttttttttttcatatgtttgtaggccgcataaatgtcttcttttgagaagtgtctgttcatatccttygcccactttttgatggggtttttttttcttgtaaatttgcttaagttccttgtagattctggatattagccctttgtcagatgagtagattgcaaacattttctcccattctgtaggttgcctgttcactctgatggtagtctcttttgccgtgcagaagctctttagtttaattagaccccatttgtcaattttggcttttgttgtaattgcttttggtgttttagtcatgaagtctttgcccatgcctatgtcctgaatagtattgcctaggttttcttgtagagtttttatggttttatgtcttacatttaagtctttaatccatcttgagttaatttttgtataaggtgtaaggaaggggtccagtttccgttttctgcatatggctagccagtttttccaacaccrtttattaaatagggaatcctttccccatttcttgtttttgtcaggtttgtcaaagatcagatggttgtagatgtgtgrtgttatttctgaggcctctgttctgttccattggtctatatatctgttttgataccagtaccatgctgttttggttactgtagccttgtagtataatttgaagtcaggtagygtgatgcctccagctttgttctttttgcttaggattgtcttggctataycagctctttttttggtttcatatgaaatttaaagtagtttttttctaattctgtgaagaaagtcaatggtagcttgatgggaatagcactgaatctataaattactttgggcagtatggccattttcatgatattcattcttcctatccatgagcatggaatgttttttcatttgtttgtgtcctctcttatttccttgagcagtgctctgtagttctccttgaagaggtctttcacacccctcgtaagttgtatttttaggtattttattccctttgtagcaattgtgaatgggagttcactcatgatttggttctttgtttgtctgttattggtgtataggaatgcttgtgatttttgcacatggattttgtaacctgagactttgctgaagttgcttatcagcttacagagtttttgggctgagatgatgggattttctaaatatacaatcatgtcatctgcaaacagagacaatttgacttcctctcttcctatttgaatactttttatttctttctcttgcctgattgccctggccagattttccaatactatgtttaataggagtggtgagagagggcatccttgtcttgtgccagttttcaaagggaatgcttccggcttttgcccattcagtatgatactggctgtgggtttgtcataaatagctcttattattttgagatatggtccatcaatacctagtttattgagtgtttttagcatgaaggggtgttgaattttatcgaagaccttttctgcatctattgagataatcatgtggtttttgtcattggttctgtttatgtgatggattatgtttattgatttgcttatgttgaaccagccttgcatcccaggaatgaagccatcttgattgtggtggataagctttagaacrtgctgctggattcggtttgccaatattttattgaggatttttgcatctatattcatcagggatattggcctgaaattttctctttttgttgtgtctctgccaggttttagtatcaggatgatgctggcttcataacatgagttagggaggagtccctctttttctattgtttggaatagtttcagaagaaatggtaccagctcctctttgtacctctggtagaattcagctgtgaatctctctggtcctrggctttttttgttggtaggttattaattatgcttcaatttcagaacttgttattggtctcttcagggattcmagtttttcctggttgaggcttgggagggtgtatgtgtccaggaatgtatccattacttctagattttctagtttatttgcatagaggtgtttatagtattctctgatggtagtttgtatttctgtgggatcagtggtgatatccccgttatcattttttcttgtgtctatttgattcatctctcttttcttgtttattagcctggctagcagtctatctattttgttaattttttcaaaaaagctagctcctggattcattgatttttttttgaagggtttttcatgtctctgtctccttctgttctgctctgatcttagttatttctcgtcttctggtagcttttgaatttgtttgttcttgcttctctagttcttttaattgtgatgttagggtatcgattttagatctttcctgctttcttctgagggcatttagtgctataaatttccctttaagcactgctttagctgtgtcccagagattctggtacttcgtatctttgttctcattggtttcaaagaacttatttatttttgccttaatttcgttatttacccaataatcattcaggagcaggttgttcagtttccatgtagttgtgtggttttgaatgaacttcttaatcctgagttctaatttgattgcactgtggtctgagagactgttatgatttccattcttttgcatttgctgaggagtgttttacttccaattatgtggtcaattttagaataagtgctatttggtgcagagaagaatgtatactctgttgatttggggtggagagttctgtagatgtctattaggcccacttggtccaaagctgagttcaagtcctgaatatccttgttaattttctgttttgttgatctgtctaatattgacagtggggtgttaaagtctcccactattattgtgtgggagtctaagtctctttgtaggtctctaagaacttgctttatgaatctgggttctcctgtattgggtgcatatatatttaggataattagctcttcttgtgcattgatccctttaccattatgtaatgcccttctttttcttttttgatatttgttggtttgaagtctattttatcagagactaggattgcaaccactgcttttttttttttttttttttttttttgctttccatttgcttggtaaatcttcctccatccctttattttgagcctatgtgtgtctttgcacgtgagatgggtctcctgaatacagcacaccgatgggtcttgactttattcaatttgccagtctatgtcttttaattggggcatttaatccatttacatttaaagttaatattgttatgtgtgaatttgatcctgtcattatgatgctagctggttattttgcrtattagttgatgcagtttcttmatagtgttgtggtctttacattttggtatgtttttgcagtggctggtaccagtttttcctttccatatttagtgttttcttcaggaactcttgtraggcagccctggtggtgacaaaatctctcagsatttgcttgtctgtaaaggattttatttctccttctcttatgaagcttagtttggctggatatgaaattctgggttgaaaattcttttctttaaaaatgttgaatatgggcccccactctgttctggcttgtagggtttctgcagagagatccactgttagtctgatgggcttccctttgtaggtaacccgacctttctctctggctgccctaaacattttttcctkcatttcaaccttggtgaatctgaggattatgtgtctttttttttttttttttttaaatatatgaggagtatctttgtggtgttctctgtatttcctgartttgaatgttgacctgtcttgctaggttggggaagttctcctggataatatcctgaagtgtgttttccagcttggttccattctccctgtcactttcaggtacaccaatcaaacgtaggtttggtcttttcacatagtctcatatttcttgggggctttattcrttccttttcattcttttttctctaatcttgkcttcatgcttatttcattaagttcatcttcaatgtctgatatcctttcttctgcttgattgatttggctattgatacttgtgtatgcttcacgaagttcttgtgctgtgtttttcagttccatcaggtcatttatgttcttttctaaactggttattctagttagcagttcctgtaaccttttatcaaggttcttastttccttgcatttagttagaacatgcttctttagctcagaggagtttgttattacccaccttctgaagcctacttctgttaatttgtcaaactcattccccatccagctttgttcccttgcttgtgaggagttttgatcctttggaggagaagaggcattctggtttttggaattttcagcctttttgcttcggtttttcctcatcttcrtggctttatctacctttggcctttgatgttggtgrcctttggatggagcttttgcgtggacgtcctttttgttgatgttgatgctattgctttctgtttgttagctttccttctaacaggcccctcttctrcaggtctgctggagtttgctggaggtccactccagatcctgtttgcctgggtatcaccagtggagactgcagaacagcaaagattgctgcctgcttcttcctctggaagctttgtcccagaggggcacccgccagatgccagctggagcactcctgtataaggtgtctgtcaacccctgctgggaggtgtctcccygtcaggaggcacgggggtcagggatccgcttgaggatgcagtctgtcccttagcagagctcaagcactgtgctgggagaaccactgctctcttcagagagatttctctgtgatttcttcacttcagagctgtgaatcttcacttcagagctggcaggcaggaacgtttaagtctgttgaagctgygcccacagttgccccttccccmaggtkctctgtcccagggagatgggaattgtatctataagccgctgactggggctgctgcctttctttcagagatgccctgcccagagaggaggaatctagagaggcagtctggctacagtggcgwtgccacgccgcagtgggttccgcatcgtttgaacttcccagtggctttatttacattataaggggaaaacaacctactcaagcctccttaatggcggacgcccctccccacaccaagctcagcatcgcaggtcgactttagagtgctgtgctggcagcgataatttcaagacagtgaatcttagcttgctggactccatgggggtggggtccacttagcacratcactcggctccctgtcttcagccccctttccatgggagtgaacggttctatctctctggcattccaggcaccactggggtacgaaaaaaactcctgcagctagctcagtgtctgcccaaattgccacccatttttgtgcttgaaacccagggccctggtggygtaggcacccgagggaatctcctggtcggtgggttgcgaagacaatgggaaaagcatagtatctgggctggatagcactgtccctcacggcacagttcctcacgacttcccttggctagggaagggggttccctgactccttgtgcttcccaggtaaggcgacgccccaccctgcttctgcttgccctctgtgggctgtacccactgtctaaccaggcccaatgagatgaggtgggtacctcagttggaaatgcagaagtcacccgtcttctyggtctcgctgggagctgcagatcagagctgttcctgtttggccatcttgccagccccaccccyggcccccagctatttagatttaaactcattaaatgaagccaacctaaaaattgaattctgcagtcacacttgccacattttaagtgctcaatggccacctgggactagtgacaatcgtattggacagtgcaggtacagaaaattttcaccgatgcagaatattctcttagacatgttggtctagtggaggtggggtgtggagagtccagaaatagtcattaagtgaacaaacaaatatgtagctgggtgcagtggctcatgcctgtaatcccaacattttggaggccgaggcaggaagatcctttgagcccaggtctttgaggccagcctcagcaatacagtgagaccaccaccatctctacaaaaaaataaaaaaattagctgggcacctggtgtttcaggtcacacctggtgtttcagtatgatctgtagtcccagctacttgggaggctgaaaggggaggatcgcttgagcccaggaagtccaggctgcagaagtctgtgatcatgtcatttcactctagcctgggtgacagggcatgaccctstctctaaaaaaaaagaaaaaattacccactccccaccaaagtaggtaaataagataacttcaaatgtggtagccatatgaaaaaaaagaaacagggaaatgtgctggagtagtcrtttggttagggtggtctgsgtgggcctgtgtgagaaggcgacgcaggasccaggacccggggaggatctgaatgaatagcaagtgctgggagcactgcagaaatataagaaggccaagcatggcccggagtagggagcaagagggagagaagcaagagatgggcttaggagcgaggcggatgcccaatcccgtgggctcatgrggaggagcgtgcattcaactcttaagtgcgaggaggacatcgcaggctgcccacgggaaattattatgatctgattcacacgtgaaaagctcactcgggttccagggttgatsgcaaataggagggaggcacgatcagagacagagggaccagcagggagctctaaagctgttcaggtgggagaarttgaggccttgggatcacggagaaagggcagtagctaaccctagagggaggcagtattcgtgttgtagctcaattctgcatccgaaaatacagggggcaatgatagcacctggtatgtggtgccactgataagaggatgcagagagctagtgtctataaagtcgccagtattttcagtatgatggtacgtggcatcatcttgtctaacccatctttgtctctcaaaatattttctagctccttgtcttgcctgttctagtctggtttccacactgccactagagtcaccttcctcaaaggccaatctgatgtcagttcccttcagggctcctgggggaacccagatgaaactccgagcttgttaatacagcctaggaagcttctcacactccagcccatgtctctgtccagcatcacctctcccactctctgcctggcactctgctccagctataccaattgtccccttggctcatgcagttcccttagctgggaatactttccctcccctacttgggtgggttctctccagctgtttgtctttctaagctcagcttagaaattttygcctccaagaaaccgcttctgtgtttccaagtctaggtcaagtgcccttacatgagatcccatgggaccytgtgcttctccatmatgttgaattacaattgcctgtttaccagtctcttccattaaactgaggtcttcacaacagtaggaactatctctgtccagttcatgattgtgcrtatctcaatgcctagactatatcgagtgcttaagatatattttgtttaggccaagtgtggtggcttatgcctataatcccagcactttgggagaccaaggcaggtggatcacaaggtcaggagttcgagaccagcctcaccaagatggtgaaaccccgtctctactaaaaatacaaaaattagccaggcgcggtcgtgggtgcctgtaatyccagctactcaggaggctgaggcaggagaattgcttgaacctaggaggcagaggttgcagtgagccaagatcatgctactgtgctccagcctggacgacagagtgagactstctcaraaaaaaaaaaaaaaaaaaaaaaaaaaaaggagctattttgtttaatgagtgagtaaatgaattcgtaaaaatcatctatttatagcatttggtagaccactctcttttcctatgcccttcttttgcacattgttattattatttttttcaaacaaccattatttaggcttcctaacctgaatgtgttagcttagggtgccataaagaaataccatatacttgggggcttaaaaatcagamatgtattttctcacagttctggagggtggaaatctgagattagggtgccagcatggtcaggttctggagcagtctcttttcctggctttcagatgaccatcttctcaatgtgtcctcatagggcagagagaaagagagagagytcgctttggtgtcttccttcaaagggcactaatcccatcataagggccccatcctcatgacctcatttaaccctaattacctcccacaaaaccatttccaaatagcatcacatcgagagtaagaatttcaacccatgaattttaaggggacacaagcattcaatccattgcataccccatgctttagaattaaaaaaatataaggtgtaaattmttttgtgttgggctttcataggggcaayatataacacctttctttcccatttaggttctgaactaactgaggaatagataaagaatgtagacagatggagattttaacagatgcttatgtggcacttactgggtgccagctaacaacttgcccaaggtcacacagcttatcagtggtggagccagggtttaaactcagctctagaatctattcttgttattctgtttcttaaagtgtaagctttaagctrgattgcaggacatggtaggtatgtgtccaccaggccagttaactctccatcaccgacttagactctcccaggcagttgcagaaccagaggtctcctccacaggggcagaatgcaggcggagctgaaaagagaagattaatrtgtgaacttagtctctctcaaattcaccaatcagctaagtcacttttcctcccctgrggaggagtggatgagggatggggagtggatggctggaaatgtgcatcagactaaggtctcatcaagggaacaagcattccctcaaacccagtggaagccatgctgcaaatatcagctctagaaactgttcttgttactctgcttctcaaagtgtaagctttaagctagattgcaggacatggtttaggtgcatatccacagggccagctaactctccatcagggacctagactctccyaggcagttgcagagccagaggtctcctctacagtgggagatatttaaagcctttcctgtcatcactggaaatgagcaaactttgctagcaatgtagtcaagggcttgggtgtttgaagtctttacttctgttcttccagaattaggatctggggctcagctgtgaattgctgtcactgaagctgtccagtccttggacacacacgcrgacakgtgggctgagtaatgggaatgttcttagaaagccagaggaccttggcagcattgcccagcagctccgtgacaggtcctgatggctgagagactgatttcccatcctttcctaaggaagcggggactggtgaacagagcatgtgtgaggcctgtgaggttcctgtgtgcattgcasggtctctcggtagagcctggtacctgggtggatgggagaacaaacaccagatgcagggtcaggtgwcttgatttcttgcccagctctcccatttgttgtgagccatgggatgctgggaaagtcattcagcctccctgtgccttcatttgctcaactgtaaaatgggaaaaatataacctatctcaaaggactgtgtgaggatcatgatactaaatgagaagatgctttataagtatcaaggctggataatttcaagctattactccatcttccttctttcctgcattgttttcgttagcagacacacgttgactttgcccaacctcctctttctggaatagcaccctgatcctcctttgggagctcctggggctcacctcttggggccatgtggattgttcgggactgactccatcccaaagtgccagggcaagyccactctacaggcctggccaagcagaacacccctggctccagcgattggttcagggatagccaggggccccagcaggggccagctgaccattccaaaacttttgctggaactcctgggagagactttgccttccttgccaggattgccarcctgtgagaatgtaagcttgggggttttgggggccatctttgccatcttacagggagagcctgccaccatacagaggcagaatggagagcaggaggaagacacagtgtcctgtgggcattgttagagcccgtgtttccagtcatgcctgacttgtgttcattatgagtgaggtgggctaacatttcatgtgtatttccctttctgkgagctgctgtttatatctatatctttaattgacttttctactgggtggttggcattattctcatagatttgtggaaactttcttttcttttagtagttattctttgttgaggtcaaattcacataacataaaatttaccattttaaagtgtacaattcagtggcatttagyccattcacaatgttgtacaactgtcacctctgtctagttccaaaatctacctttctttcttyctttctttctttctctttctttttccttccttccttcccctttctttctttttctttttctttcccctttctttcttttctctttctttctttctttctttttctttctctctctctttcccctcccttccttccttccttycttttctttctctctctctttctctctctctctttccttccctccctccctcccttcgttcctctctctctctctctttttctttctttctttttttcagagccttgctctgttgcccaggctggagtgcagtggtgcaattgcagtcacagctcactgcaccctccacctcttgggtgcaagtgattctcccacctcaacctcccaagtagctgggaccacaagcatggaccaccacgcttggctaatttttgtttattttttgtagagaagaggtctctctatgatgcctagactggtctcgaactcctgagctcaagcgatcctcctgcctttgccccacaaaatactgggattacaggcatgagccactgctcctgtcccaaaacatyttaatgatcaccaaagaaacttggtacttcctattaagcagctactgcctgtcctcgctctttctagcccctgacaaccactcttctgtgaccatagagatggaatttcctatggatatatctattctggatatttcatataaatggactcatataatctgtgtatttctttgacttagcataatatttttaaggttcctccatactgtagcatgtattggtacttcatttctctttatggctgagtaatattccatcatatggatatgccattttttgtttatccattcattcaaacaacatttgggttgtttctatcttttggttgttgtgaattgggctcctacgaatattcaygtatgagtatttgtttgaattgatattagaaaaattattctttggcctatgataggtgttgcaactattgtttctgagcttgccattggtctttgactttgcttttgtcaagcagaattttgtaagtattgttctgtggttgaatttgtcagcttttccagctaatgggttttgtgacacagttggaaaggtcatccttataacttgaggttataaaacaactgtaccatcaaaacctctgcttatccacgtatttccttaccaatgaaacaggtattgaaaacagccctacttgccattccgtcccctcccagggttattgtgaggaccacatacgacaaatgatatgaaagagccttacaaaatataaagcaatatatacacattaggcatgttgtcatcatcactattaattctattaaaatctgccatcaactagctgagttctgcttgttgctttcattttgcagagcagggcttgaagggcagaattattcactgagctgcccaaggatgtatttgctggtagcaacgtggagaatgttacaaaattagtcatctcggcgagggggaggtgttcatattcgaccagaaaaataaaagtactttcaaccaaaaactattctggccacttttccttcagatgaagccttttttctttctaccaggaaaagaaaccggttcagtgagttttgcattgtttagctgttattgtaatttatgcctcactagtggtcacttgtgacatgttttccttatatttttaaccccaaattctttttttaaatggaaaacttyacgttgaactccgtattgaaacaatgtaattatagggaatgaaaaaatgggttattacttgatagcaattattcctatgctgattcctccgggatagaatcgtgcactgtttaagtccttgggctccgctatgagccatacctgggcttcartgcaattaagttactagctagctttgtgatcttgggtaacttgcttcactgctcttggcctccgtttacccaacttcaaaacaaggatgatttacatcactggactcatggggctgtagcaaaaaatcagtgataaaatctacatagagtgcttggccctgtgcttgtgtgcagggagaacttggtaaatactagctatcagtataatttaggaaaatctaaaagaattcaggagatgagccccaaggaaatggaataaacacttccaggggcttttctggtccttagtgggtggcatagatcaaatcacatggtagaggccctcccctcacacctaccacatttatttggagacaaatctggtttctgttactaccatgtgaagggtaaacattgggaatagcagttggttctcagacagcaaggaaaaagtgggctcacagaggaggagtcacaggagggcagcgggagggctggggtgggctgtggggaggactggaagggtgaggacctggtgctgggggcctgcccaggtcacacccacatcttcttggggatagaagattccagatgatgtgggtttattgtgtgtggtgatggatttttcaggggacacagaccttttcctcttttttttcctctcttccttttcccaatctgggtatctgtggagaccaagctctagtcctaggtctggcttggctgggccctgtattagtccattttgcattgctgtaaaggaatacctggggctgggtaattaaagaaaaaagttttatttggttgggtgtggtggctcactctgcaatcccagtacttcgggaggctgaggtgggagaattgcttgagaccagsctgcccaacatggtgagacccccatcttgagaaaaaaaaaagttttatttggctcatggttctgcaggctataccagcataacaccagcatctgcttggcttctgatgaggcctcaggaagcttccaatcatggtggaaggtgcaggcatatcacatggtgagtgaggaagcaaggaagaggagcgaggtcccagactcttcatcaaccagatctcttgtgaacccattaccgtggggtggacaccaagccattcctgagggatccatccccatgatccaaacactgcccaccagatcccacytccaacgttgaagaacacatttccacagctctaaaaaagaaattatgtctgtgagacttctgctctatgccaggcactttaaatccatgatcgtgttggatcctgtgccatgggtggatcactaccctatgacagatgaggaaaccaagactcagagaaggtgtattcctccatgagccccacacacagctggtgcacagcagagccagaaggtaaaccaccatctgacttactccaaaacccagcctctgccaggtgtcagctcagagcgctataccatctttggccttggttttgtatggctttttgtgacatttttgtgacatttccatggctcagcaccctacacataggtctcctagaactatttgtggatttaaaattttaataatggtgaaaatagctgacatttactgagttcctgccaccagtgggcacacaagcaggttgagccacttgctcaagttctcatgagctcaaggctcgtggcagagccaggagaggatccagtctgtcgtactccaaggtgtatggttttaactttcatttttcttgaagaatctagacttgcagcagggatgttaatctctgtgcccatctttctcaggtaacgtggggcttttgtgggtttgaactagttagaagaggacagcaaagggcctgaacatgtccaggggaggcgtgaggcagtggggtgatggcaagggctgcgggccagtggcatctatttctgaactggtgacctcctgcctccgggtacaaggctataataagccccatgattcaccagttggacttctccctgtcgttgctccaagcaggtcttgtgctttgccacctgtgggccccagctcatgctgtgtgctccaggagaacatcctgccccgcctcactccctttgccatacttgcctggggacgcccactgcagctgccatgtcctctaggaagccttgatggactagcatggataacctattcatttctgagtccaaacagaatcatttattatagactcagaaaaaggcaaatggaagactatacctattttgagaaatttgggaacatttatctcaggggacagtcaggggccaatacacattagtgacaatcttagcatatgaaattccagtgatcagcgactctttagtgcttgactcagtttttacagaatgaatcttattctaccttaattccacatgaaatgggtttggtctcccttgtagaatgcaggagactttgagcctggkttggaaggctggtgaccttgggtaagtcacttcccatatctgagcctctgctcctttgtctgtgaaagagtggtgcttatacctatgttgttaggttgttggggratataaaagggtaataacagttgctactgtttattgagtgcttgctatgcaccagagactgtgctaagcttagctttgcatttttctttgatcttttcaagagctcctctcattcccgatgttccttaccctgcaatattttttcccatagcactttacattttgtatgatattatataatatacttactgtgcttatttttggtcttcctctcccagggcctcttgcctcgtacaactccagggggcaccattcacaatgctttctactccaggggtgctttttactaagaatattagcatgaatggtggaaactsctggagttgtgtgatgtggagccccgggagcttcagaaggtcagggatttttgtgtgtgccagttctgatcattgctgtatccctgtacccagaacggtgctagacctatagtaagcattcagtaaatatctgttgaaagaatgaataacatagcctccaaagagagctgattttactatctaggaaacygaggctcagtctgacttatgaatttgcccagagccccacaagccaatgacccacccagctgttctgcctccagtgtgcctgctctgcgtggctttgctaagctgcatgcctttaactcctcgcatcgtctctgccaccaagtaactgctcaacaaatattgatgcttttccctacatgggtcaggccctctgctagactatcccagtagagtgacaaaccatcatatagctgttgattccagaaactgaattaaattgcacagtgcaaaaaaagggaggatcttaagtttttggaagaaaaatccctaacccaagtgctaatgtttggagtttgcagaagcctctcaagacttaccaacccgattacttttcctgctgccttcccttttgtgagcgtttcttcccctttttgcttgcagtgagttctgctctcctgtaggctacaatgtgtcagttgttataaaatccgggaggcggagtctagtgacgtgagcagtgggggagagctcagccagccctgcagggcgagcagtccagccttgtgttcaccggagcttaagcgttgcagcaggaaaacttccatctcgctctcctggctttgatcctcactggacatcagaccagaggcaccgaagggagggaggatgcgagatgaccggccctttggcaacctgaccatcgacttagcagagccttcaaaagcaagccaggggctggctgcacgaccaaagaggcgccgcgcctctcgtggatgtgtgtgtgtgagtgatccagcgagtgtgtgtgcgtgtgagggtgtgtgtgtgtatgcctgtgtgcacagcacaactgtgtgcgtgtcccggtgagtgtrcctgtgcatgcgtgagtgtgtgtacgtgtgcatgtgtgtgtgagtgcgcttggttattactattattattatttttggaagaaaaatctttgaaaatctggggcaggttactgtgctcctagggtgattcttcttttgcaagaggagctgaccagggcaagctactagagccatttctcggcaagtaaagagatttttccttccagaaggagaaggatttttctccctgctctgcagccaagtgaaagagattagtccctaaacctgtgaaatcgaccagagctgtgtgattaccagggcttgagagaggactcgaaaagaaaaggagaaataaatcaaacagcctgtcagttcctttggccacgtcagaagatgtcatctcaaactaagttcaagaaagacaaagagatcattgctgaatatgaagcccaaataaaaggtgagatgcgggctgggagagttttccttctcctcccctttcgtttttctcttgttctggttcccatcccccgctgccccccgttttcctctctgccattatgaaatgttatgcatcaataatctttttgtgaggagtaacagtggcagccgcacaagtccggactggtttcaactgcagatagcgctggggctgggagtgtggattatggaatgggcagcagtctctgcattgcaggtgtgtgaggaggatcctatgcctgactttaggagtgtcgctgataccccatcatcttggcggtgacatgtcactctaaggccattttgatagtcactacctccaccccttccctgccatggtaaaagccctttaatattggggtatttttttaccatctgctctttttttcctccccctttttggtttctgttggtggtggtggttttgcctccgcctctttctctgggccggaattcacatgcatgtgcacagcgaggcagcatccctgggcggcacttctttgtcggtgtctctgggctggcctgggttgccatggattaactgttatggggcatattgatccagactaatgcaggcatttgggcataaaaagggagcttggtgcagaaaatgtattatctcgcagtgtgcagcccaatcactctgtgccctggcgtttaggttcatcagctttcattcaaagccaacacctcggcatgccgtttgggctggtcagcgctgcctggcttccggggttccaggagaagcctgccgggagggcgagatgacctctggctgctggttgcaccttctgtgccaccgggtgtatacttctttcagaagccgctccctaaatccacgctagccaggcgaaataggaaagggaacacaattgcatggctaaatgcgggcttgccgcatcctcattcaggccagactggggcttctcccacccctacacgttctaggctcagctttggcaaggaaaatctaaaagctccatccagcaggctcctcctttctctgaggatgtgccctgtgggaagcctgggctcgtgcctcttggcgtccgctttctttctggtcatggttctccttgctgcgacacagggtgtgttgtggcctctcctagaaagagtaaagacaaaatgcatcttcagcggaccttgaggcctatctttgaggttatgcacaggctgttgagcaagttgggtatttggggctcaagcaacctgaggttgccacacctgcttctgggcgctgctgcaactgaagacccaatgacccagggagctgggtggcctccttaaaagcagcgggaaggctgggcaccgcagctgccatacacgcttcagatgcttgggaaactttgggagtggagcagccacggggggagggatctgttttttttccagtctcaccaacagtctttttgccttttagtcctggtcaaaagcccagcgtgctcatcacctctgggcakatcctagggcaagaggagcagaaaaccctgctcttccctggtctcctgtctttggtttttcagttcaatgtggaaaacagtgacttacgatgtctcagccttgctgaaaatttagaaataagcgctttattggtcagagattttaattcacccaactgctcaatacaaaagcctagtttcaatctttgaatagactctttttagggagtttatgttttataaaatgaatttggccaattattattattttataaaaattaaggttgccatgaaaatgccttgagagagaaggggatgttgagttttggacagttcaggttttatgatattttcttggtaggaaatgtgcttatctcattttggaaggattgctactactgggccagtgaacttttcttcagggccagttaggcattaattgccctggctgatccttttgctttttacctttcatcttttattttaacaactaagcagcgagtaccctgagttttatcagaaatacaccaattaccaggcattcatcaggaaatgtgtccaratgatcttgtctcttccaaatactaaatttccttgcattctggctaaaggagttacatcttattcctttagaattgacacccacaaggwcaggtcaggatatggctgtccctgaaaccctctggaatcttttcttttaaaattctgtgtgttaatcaccatcataattattgatgtgtgtctagggccctgcattttctatggctaactcccagacatcacttactcttggcccacacaatgtacagtagggttagtgtgaactcagtttcagagacaaggaaactgaggcccagttaatgttaaatgacttgcccaaggtcacaaggccgattttctcccaggcttgtgttccctgacacattgtttgcccgaagctgccccttgaaggattgatgtcagcagcagatggcagttttgtggggggactggcagcctcttgatggagttccattgtttaccctcttactttcatcccgttgcctttgttgcatgcctctgaagaacatttgaccagtcaccaaaaacagtgcccgaggccaattacctttctccctgggaatcatctggccagtgggatgcaaaaagtccacctagtcagacagattttgtgctttgtgaattttgtgaagggaacttttgatttttaaaaacagwgctgagttctttgttgacttgttcccttttatgtctttttcaagaatttatagacctaacacaaaggaatgttttagaacagtattttttctattgtaaaatagaaggattcatgccttctcttgcctcatcagatacttgaagccttttgrttatgaagcagtagtaaaccatatgcttgcacatttctagtgatggggaactcactacctcccaagcccacgtagtctatcatctttggacagctctggctcttgtaagcattttttcttttttcttttgtgacagagtctctctgtgtcgtccaggctggaatgtagtgatgtcatcttgactcactgcaatctccgcctcttgggttcaagagattctcctccctcagcctcccgagtagctggcattacaggcacgygccaccacatgtggccaatttttgtatttttagtagagacggggtttcaccatgttggccaggctgatctcaaactcctagcttcaagtgatccacccgccttggcctcccaaagtgctacgatcataggtgtgagccaccgtgcctgacccttgtaagcattttttcttatgttgcattgaatatgtctctcatctacttattggttctatagttcctttccctttggacttcacaaaataagacagatgtgtcttcccttggactgcccactgggtgtgtggagcctgggaatataacccctgacaatgattatcctcatataataggatkgttcgctaccacttaccatctccactctcctctgtctctactgcatcctgggttgcaaacctcagtgtcattgggtgcttggcagatagaataaatggataaagttggccacgtgaaacaatttgtggcagctggcctaccacctcagtgcaggcagtagaagggtggtggtggtgattgtgacggacttcagagtacatgttctgtctaaatgggcagtcactacttaggttcaaccaattattgctgtttaggaatgtaggcccagacagatttttcaatttttcaacagatgccagaaatctggatgagagctttatgtttttaaagagattttgccaaaaggacctccaaaagattatattatcagtatcctatttcaagagtggcactgagttctaaatgtgrttctctagatgtggccaaagacagaaaacaactatcacctcctttctgctgtctgcaatactactattaacatagcccaaggattgaattagcctttggtgctgctcaccccctcagtgcaccatgtatattaagtctgctgtgtttctccaatacactagcctaggagccttgtcagagagaagaaaatgaaatgcatttaacatgacttgttcttggtgaccccatgctggtgccaaatggacattacttcctgtcctaggtgctcataagtgtccttaacaaatctgtttaagawccttgccgggagtgatatcatattatctagtctggaactggcaaaccataacatttttccccttttgaaaatcagaacatttgccaggctccagctttttggcacctatcctattctctacaattccctcaaagatcactgatgatatttggtgatcttatctgcaggctttctcagtatcctggggctctaattcatcttgctgccagacatgatggttagttctgcatctattcagagttcctatttccattgcaacctgatagaaaattgaaatagaaatgcaatgattgactttggtgctttttttttttgttacatattcatccatcttcttagtagcaaaagtctagaggtttgaggaagaagggcaggtatggaggatgaccacagaggggcatgtatttattcattcatttctgcaytaattcaacaaaagttgattatctacattgtacctagtcttgtgctgagtgttgtgagagacacaaagtatatgatacattctttgctttctaagagttttcttggaatatggtgataaaaatgagagaaagaaataaaaaaatcccaaacacaaaaacttcgagagccagaacgaactgaatcttagagcgtatatcatgcagtgattagaagatcaccttaggaatgctcgctggtttcaacaggataaaatgaagaaagcaggctgggctgggcaaacagaggggagtagtgggggctgtggccaagtggggagttcctctagagaaggcagatgctgctccagcctgctcttcctaggcaggaatgtgagcccagaaaggtcagttccttcagtgtttcaagggaatctggatttttaagcaaaatctcttgatttttaaatggtggcttaaaaatttaaaaacactatgcttcctgaacaaacatgtcggtagaacagttttagcctgttgggccaccagtttgcaaaatctggtctacaagttgaagtccgcacgaagccttggtgaggggcctcagccaattttcctatttcatcttcagtcattttctctgtgataggcttgtgctcttataaacgcaaaaaaccagtcccttttctctctctctctctctctttttttttttttttaagacagagtctctctctgtcacccaggctggagtgcagtggcacaatcttggctcactataacctctgcctcccgagttcaagcaattcttgtgcctcagcctcccaagtagctgagattacaggcatgcgccactatgcctggctaatttttgtattttcagtagagacggggtttcaccatgttggccagactggtcttgaactcctgacctcaagtgatccgcctgcctcggcctcccaaaatgctgggattacagacgtgagccaccatgcctggcgaccaatcccttttctctaaatcctccatacccttcccctcctccaggtctttcccatttgtgcctttactctccttaccccctgcctcccactcctatttgcctcaaatacttctgatcgcccttcaatgtctactcaaatgatgccttcttccacgatgccttccaaactcttctaggcagaattagtggtcccctcatatctccccctctgttccaaaccttataatccttaattgaaattttatgtttaggtctttggccacgaactcttgagggcagagaggcttatggtcatctttgtttctccaaagtgcttggcatgtgattggttgaaggagtggctgataagttactaaaataagtttaggctgggctcagtggttcatgtctgtagtcccagcactttgggaggccaagatgggtggatcacttgagcccaggagtttgagactagcctgggcaacatggcaaaatcctgtctctacaaaaaatacaaaaattagccaggtgtggtgatacatgcctgtaatcccagctactcaggaagttgaggtgggaggattgcttgagcccaggagttcaaggctgcagtcagccatgatcataccactgtactccggcttgggtgacagaatgaggctgtctcaaaaaaagaaaaagttttaatcttataactcatagctcagtgtttttgttttgttttgttttgttttgtttagatggagtcttgctctgtcttccagcctggagtgcagtggcacgatcttggctcactgcaacctccaccttctgggttcaagcaattctcccgcctcagcctaccgagtagctgggactacaggcactcgccaccatgcccagctaatttttgtattttcggtagagatggagtttcaccatgttgcccaggctggtctcaaactcctaacctcaggtgatccacccgcctcggcctcccaaaatgctgggatttcaggcgtgagccgctgtgcggcttcagcttttttctttgatatccttcttagttggcttgggctgctataacaaaacaccatagcccggatggcttttatttacttctcagaattctggaggctgggaagtccaagatcaaggtgttggcaagttcagttcctggtgacggcctgcttcctggcttgtagacagctgcctttagccatgtgctcatctggcctttccttagtgtatgcttatggagagagagaaatctctccctttcgctccttcctctttttttttttttttttttttttgaattagggtgtcattctgtcagccaggctggagtgcagtggtgtgatctcagctcactgtaacctccaccccctgggctcaagtgatcctcccacctcagcctcccgagtagctgggactataggcgcacaccaccatgcctggctctttttttgtatttttggtagggatggggtctcaccatgttacccaggcttgtcttgaactcctgagctcaagcaatccacccgtcttggcctcccaaagagcattattacaggagtgagccactttgcctggttggctttcttcctcttcttataagggcactaataccatcaggagggacccatcttcatgatcttatctaaccttaatcacctccccaaggctccacctgcaaataccatcacactgggggttagggcttcaacatatgcatttttgggggacataaacattcaactcataataacatccacgcttcctattctattgaaagtagaggtttcactgggagaggaaatattcttaatggtttgctcgatttccttgcatttccttggtagatgagatgtttcttagtggagatttggtgaaggctgttatgttgacagccgtctcagtggggtgtggtctagggagcacttccttccaggcccctcccagtctggggaaattaatggatctgagagttcatattagccatttctggagtttttactactagagtttatatgttggagatgacatttcctttccagaaactcctattattcattcattcagtgactttgtaagccatgcttcaggctgtatagctttatttagcagtgggaggtaattcattttttttttagcttctatgtctcagtcatatatggagtatctaattttgtgatccctgtaactctgtgaggtagtcattattattttcattttatagattaaagtctgaagttcagagaaataaaacaaattgcactggattgcacagtgaacagtggcagagctaggtttaattcagcatcttcctcactttccggggtgcacgaaagcaacatgcatgccaaggcaacaaggggttccttcagtgggggaagtgtggggtgggtcttaacctttgacttccttcccttcctgacacttccacactcctgctaatccagcctctcctagtttgcacttgatgccaccgcggtgtgtcagatcccttcaatcccaccccaggaagtcacctttgggaaagtgtccactgcaaaactgcccgcacggctgtgatgcaggctgccagagctacctctcaccagccagcccagtccaccaccaacctggaaatacggaaccagaaattttaggtgtcttctagtccaactctatttgtttttcagatgtggaaattgatgattggagaggggctgtggctttcagattacttttagactgtctctccatgacggtggaaggtttatctgcttggttcattgctgtagcgtagtgcccaccatctagttggtgatcaatacatattactgagttgaattgttctggtgtgtgatggttgcctggggaggcagagctgagtagtaccttggaaagaaagatgaggcaagggtgtctagccgggtaaggattggtgaggtcaggagggggtgagtttgggctgcctcctgaaattgagtcctttccttcacagctattaggaagggacggggttgactttttaaaggtgctgagcttgagaacttctggcttaatacagggcccaggaagctgtcttgggcttgatttcacttggaaaatattcattcctgatggcttgttggtgttcataaaacatcttggctggcaaataatggcactttaactctattccctcagtttgttgaatcattatgctagtttatgtttgggataatgttccctaagagtattcctttaaattggttgtaaagaggtgttgggtgaaaaaaaagtagttgtgtgctctaatagattttggaagttctagaataaacagtgtgaaataggcctgcttcccccaggacttctgggaatcttgcttgtgttaagtgtgaatcgctcagtagggcccatggagtttcctcaaacttacttgattgtgtagatatttttcatggactgggtcacaagactctgttttctgagttacattttagaatatgtcaggctgcacaattcatggatcatctgggtgctttttctttttgcctctggctcagttccctaatgttttatacttgtctcagagagcagtttgaagagggaaagaagtaaaacaaatgcacatctagttgagctgagtgatatcaatgtagtgctttgagttcacctaggaaatgtggattttgacatttccaattacagagtgctcaaccattgatttaaatggtaatttggaaacagtgcagccctaatcaatatgcattgcgtgtgcccatctgtgcgtgatggtaatggggtgcacactgctgcagcagagtgttccaggttccttgaatggacctggctcttccccctgggattgcatagccagtgctaggtgataatggcacagatgaacacagagaagcccatgttcccttgtgcctcagagtgaacaaatctcagctacaaacccaggtgcacaagaaatatatttttctttctttcttggtgactcagtctccatttcacatctctatcttttgtttttttgagacagagtcttgctctgttgcccagactggaatgcagtggtgcaaccttggctcactgcaacctatgcctgttggatttaagtgattcttctgcctcagcctcccaagtagctgggattacaggtgccagccactacgtccagctaatttttgtatttttagtagagacagggtatcaccatgttggccaggctggtttagaactcctgacctcaagtgatcctcccaccttggcctcccaaaatgctgggattataggtgtgagccactgcggccggcctcacatctttattctgctgggggtgacagaaataagtataagtcaatttggggtttccctccagggttgtgctccaagatccagggggacttaggcagcaccaaggcccttgtgaggacatctgttgtggtttatcatcaatctactttggcagctactgggacatcctctttcttattgagtctttggtggttggtctgtgtcagcaatccttctttgttcctcatgtgtccccctctccttggttccttccatgcaatttgctggcaccagaggcgattctgctgctcacacaccacactgggccatgagggaccctggatatttgcctcaggcctgtcttggccacactcaacacttgcttctcccctggtgcctccctagggctctgcctggggaagggatccggcttctctccactcttagattctgtgaatctgtttggtggttgcctcatcatctccctccccgggcttgttcgggatgagttgggcagggtgcagatttttttcttatagatccctgtacctacatatactttgctttactgatttactctccactttggtctaggaaatctttacccatatgctcgtgtggtggggcggggaacaagggtggtatcctggctttgtcatcagacattctgtcaaagctgttttccataaatctcacgttctttctctcctccctaaggacttttgaaaaaatgccaagaattgactctttttctgcattatccctgaggcaatgaacacagaatgccctccctgactgaggagggaccaagggggtcaagaaaatttggagaaaagcattcaatatttcaaagtattaactacagtgaatttccttccttctccatctcctccatcctggcctagcctgccattacctcttgctgggaccagtgcaacccaaagtttctcagggtctcctgactcagagcttctcacccacagttggcattttgggctggatcatttgtggttgaaggtgctgttctgtataacataggatgtttagcagcattcctgacctgtacccactagatgccagtagcatccctgctcccagttgtgacaatcaaaaatgtctccagacatagccaaatgtcccctggggacaaaatcactcctagttgagaaccacagttctaagcggtctccctgcttcttttcttgtcccatagtctactctccccacagcagccagcagtaatctgtacaccatttaaatctggccatgtcacttccctgtttaaaacccttcagtagcatctcattgcatgagactagaatccaagcccctcaactgcacttagaaagccacgctgtgctcacctctttccctcccctggtcactctccccttgtcattctatccagtcatgctggcctgtactggtttctggacttctccaagcttgtacttgctttgggcctttgcacttagattttccatctttctggaatgctcttgccctggattgccacttgattggctccttcttggtattctgctttgaggttgcatgccacctgcagactaacccatcttaagtagccaaacagcaactctctattggatcagctgacctgaattcttagcagagcactaaaagctatatgatatttttcacgctttctttgtttcttctcttcaccaggactgaaactcaataagagctttgatttctcttgttcattagtgttttttggcacctagaacacagtgtaggatgtttagcagcattcctgacctgtactcactagatgccagtagcatccccgctcccagttgtgacaatcaaaaatgtctccagacatagccaaatgtcccctgggggcaatgggtgttctaggtgccaatggtcacaatttttgttgaacgaatgaatgattataggtgttcttgtgatgg

SEQ ID NO: 9861 - DNA, 14568 bp, Homo sapiens
cacacagacacacacacacacacacacacacacacacatatggttttaaataaattttacataatgtaggctcatgcctgtaatcccagcactttggaaggctgaggcaggtggatcacctgaggtcagcagtttgagaccagcttagccaatatggtgaaaccttgtcactactaaaaatagaaaaattggctgggcatggtggcaagcgcctgtaatcccaactacttgggaggctgaagcaggagaatcgcttgaacctgggaggtggaggatgcagtgagccgagattgcaccactgcactccagcctgggtgacagagggaaactctgtctcaaaaaagaaaaaagaataaagaaaagaaaagaaaattatatataatgtatattggctgcattttttaagcaaaaaatgggacaacatattgttctataatttgattttttaacacgttatagacatttccttgtcattcctttaaataactattgattggtagatatttgagtaatttccagttttgaaattaaaagcaacaaccatctatgtgtaaatatctttgtacacatgggtgaatttttttttttttttttcgagacagggtttggctctattgcccaggctggagtgcagtggcgccatctcagctcactgcaacctctgcatcccaggctcaagccatcctcccaccttagcctccctagtagctgggaccacaggtgtacatcaccatgcctggctaatttttgtatttaaaatttttcggcttggcatggcagctcattcctgtaatcccagcactttgggaggccaaggcagttggatcacttagggcaaggagttcaagaccagcctggccaacatggcaaaactccatctcaactaaaaatacaaaaattagttgggcatcgtggcacatgcctgtaatccaagctactcaggtgaggcacaagaatcgcttgaacctggcaggtggaggttgcagtgagccaagatcacgccactgcatttcaggctaggtgacaaagcaagactctgtctcaaaaaaaaaaaaatgctgatttttcatagcgacagcgtctcaccatgttgctcaggctggtctggaactcttgagttcaagcaatccacctgcctcagcctaccaaagtgttgggattatcggtgttagccactgcacctggccagtgaatattttttaaggatagatttctagatgtagaattactactgggtcaaagatatcaaaattttgtattgatgaattgtcatctaaaagtttttaccagggtttctcaatcctggtactattgacatttgggcccagatactccttggttatggggtttcattgtacattgtagaatgttttacagcatccctcaatgctagtagcacccccactgttggacaaccaaaaatatctctagatattgctaaatgacccctgggggtgcaaaatagccccaggttcagaaccactgcctcggacatttgctttcttttactttccttttatttctctttctcaccatctccctttcaacaactcatgctatccttccttcttaaagaaaagaacttatgaggctgggtgtggtggctcacgcccgtaattccagcactttgggagactgaggcaggtggcttgcctgagcccaggagttcaagaccagcttgaccgacatggcgaaaccccgtctctagtgaaaatacaaaaattagccgggtgtggtggcctgcgcctgtaatcccagctacttgggaggtggagacaggagaattgcttgaacccaggaggcggagattgcagtgagccgagatcgtgccattgcactccagcctgggcaacagagtgagactctgtcttgaaaaaaaaaaagaaaggaacttataatttagtatatatcacccttccttcccagtatatttacactttagatatagatgaagtgaaagtgacaatgactaattcaagaataactatctaatgatgggatgaattttgatgggagagataatttggggtactttcctgataggctttaaatcatactatgtacacttaaacatcctgttggctctattcatcttcttttctgtagaagtttctctgaataacaatgattagcatctatattcagaatgtcaagttcctggcccagcgcgatggctcacgcctgtaatcccagcactttgggaggccaaggcgggcagatcatgaggtcaggagatggagaccatcctggctaacatggtgaaaccccgtctgtactaaaaataataataataataattaaaaaaagaatgtcaatttcctttgatttttttaaaagggaattctattgattcaaaacaaaaaaaaaaaagaagagaaaggtaagcaatgcttaaaaatcaagaaaaatgagatgaattagggaaagtaaagtttattgtttaaaaaatactatattttggctgggcacagtggctcgcgcctgtaatcccagcactttgggaggctgaggcaggcagatcacctgaggtcaggagtttgagaccagcctggccaacatgggaaaccccatctctactaaaaatacaaaaattagttgggcatggtagggggtgcctgtaatcccagctactcgggaggctgaggcaggagaaaattgcttgaatctgggaggcagaggttgtagtgggccaagatagcaccactgcactccagcctggatgacagagcaagactctatctcaaaacaaacaaacaaacaaagcctatatttttagcagggcatggtggctcatgcttgtaatcccagggcagtgtgctaaatgcaagacgggatagaaaaaggcataaggaagtcttttccttgaattttaggaaggaatgtgacaagaacatgaattaccagcacaatgtgttaaattcatgtgaaagagtaaaaattctcttgagatgaaggagatggtagcgactttggagaggagatggaatgtgaaatgggctttaattagggttttgacaaaagataattgggggacaatatgcagaggaaacagcctgagaaaacatataaaggatgatataggtaagcaacagcaaacagtctagcttgtagaagtagagtttacaggggttggggatgataggctgtaacattatgtgactccagtacctagctgaggaacttggatttgtcaatggggcacctaggtagattttgagtagggtgatgacaggtttggggcctcaacttgagaaaattcatcttgtagctatctgtggtataaattggcatgggggctgataaggtttggctctgtgtccccacccaaatctcatgttgaattgtaatctccaatgttagatgagggacctggtgggaggtgattagatcatgggggcagatttcccccttgctgctctcatgatggtggttgagttctcacaagatctggttgcttttgtttgagacggagtctcgctgtgtcgcccaggctggagtgcagtagcgtgatcttgactcactgcgacctccacttcccgggttcatgcaattctcctgcctcagcctccagagtagctgggatgacaggggcgtgccactatgcccggctaattttttgtatttttagtagagatggggtttcactgtgctagccaggatggtcttgatctcctgacctcatgatccacccaccttggcctcctgaagtgctgggattacaggcatgagcttgcttccccttcaccttccaccatgattttaagtttctttaggcctccccaaccatgcttcctctacagcctgaggaactgtgagccaattaaacctcttttctttataaattactcagtctcaggtagttctttatagcaatgtgagaatggctaatacaggagcaattaatggtaaagagacagtcgggcaccgcggctcatgcctgtaatcccagcactttgggaggccgagataggtggatcacctgaggtcaggaattcgagaccagcctgaccaacatggtgaaaccctgtctctactaaaaatacaaaaattagcttcggtggtagcaggtgcctgtaatcccagctacctgggaggctgaggcaggagaatcgcttgaacctgggaggtggaggttgcagtgagccaagattgggccattgcaacacagaggttggggtaacacagcaagaccctgtctcaaaaaaataaaataaaaataaaaaataaaggtaaagagactagttgggaggctatttgtaataaaccaggatttgtctgcctcaacactacactactgacattttgcatcagacaattatttgttgtgggagggttgtccttagtattgtagaatgtttagtagtgtctctagtgtctgtttactagatgttagacaacccctcgccccctatatgacattgccaaatgtccctatggagacaatatcacccccagttgataactgtgtgtgtaacagaccatgtgagaaataaaaaagggtggatgttagacatgggtaaggacaaaatctaaaagccttggcaagtgtttggataggcttgcaactgagaaagagggagtgttgaaagctcaaacagagaaaggtcctagaggccatgtactgtagtctaatatgcttatcattgcttgaaacattgtaaaccctcttggaaggcagtttggtaaaacctattaataatcacaaaaagtatcttactttttgacccagcacttttatttctgggagtttatcttaaatgattcaaatgaagacaaggaatctttatgtacaaagcaattagttgcatgacagacagtgaccacgttctcaaaaattacacccgcatgccaccacattgcctgttaaattagaagccgatttaagatcctgagtttaagagccaaagaagttgtagctaaagaaacaaaatcccagaggggcaggaagggcagatatcaagaatgcaagtagagaaattcttaacttatttttcagagagaggacaatgaatttgagaatttgtattggagaaaagagggagagaagttaggtggaggaactcctagataaggcttcaatcagtgaattcatctgcagagcagaagtttctgcggaactcaaactgcctgggggcattccttgaaaagaagaattctgcactttttggtgggaacctgccggtggaacatcctgtttagaaatgaggacatccaaggaacactgcaatgtgcagagactagaaggaaaaaacagtcaagtagccatttctcctggggagtctctagtaacttgattttgtgcttcttcttgttttttgagacaagagtctcactctgtcgcccaggctggagtgcaatggtacgatctcggctcactgcaacctccacctcccgagttcaagcaattctcctgtctcagcctcccgagtagctgggactacaggtgcaagtcaccacacctggctaatttttgtaatttttaaattattatatatttttatttttttgaggcggagtctcgctctgtcgcccaggctggagtgcagtggcgccatctcggctcactgcaagctctgcctcccgggttcacgccatcctcctgcctcagcctcccgagtagccgggactacaggcgcccagcaccacgtccggctagttttttgtatttttcttttttagtagagacggggtttcaccgtgttagccaggatggtctcgatctcctgacctcgtgatccgcccgcctcggcctcccaaagtgctgggattacaggcggagccaccgcgcccggccaatttttgtagttttagtagagacggggtttcaccatactggtcaggctggtctcgaactcctgacctcaggtgatccacacacctcggcctccgaaagtgctaggattacagtcgtgaaccaccgcgcttggccgcaacttgatttttaaattgctctctgagtgtagattccttgtttgtttggcaagggttcttgccgctgccgctacagcttgaagccaaacatttaatgaaagagagcgggaggggccgaatagaagaatgatgggcgtggccaaccccgaggtggctggaggccgcgcccccttcccagagtgcaccgcagccgctgcattcaggaascgytttagcttcgsccccggccggccrggcggggaagactggtgtggtctggccatggatgggctccaggccagtgcagggccgttgaggcgcgggcggccgargcgccggcgcaagccccagccacacagcgggtcggtcctggccctgcccttgaggtccaggaagatacgaaagcagctgcgaagtgttgtatcccgcatggcagcgctgaggacgcagacgctgcctagcgagaactcggaggaatcgagggtggagtcgacggccgacgacctgggggacgcgctacccggtggggcggcggtggcggcgtcccggacgcagcccggcgagagccatacggccacctggggcccgcagagctgctggaggcctcgcccgccgcgcgctccctgcagaccccgtcggcgcgcctggtgcccgcttccgygccgcccgcgcgcctggtggaggtgcccgccgcgccggtccgggtggtggagacctcggccctgctgtgcaccgcgcaacacttagcggccgtccagtcgtccggggcccctgcgacggcgtcggggccgcaggtggataacacgggtggggagccggcctgggactccccgctgcggcgcgtcttggccgagctgaaccgcatccccagcagccggcggcgagcggcccgcctctttgagtggctcatcgcgcccatgccgccagatcacttytaccggcgcctatgggagcgcgaggcggtgctggtgcggcggcaggaccacacctactaccasggacttttctctaccgctgacctggattcgatgctgcgcaacgaggaggtgcagttcggccagcatttggacgccgctcgctacatcaacggacgacgcgagaccctgaacccacccggccgcgcgctgcccgccgccgcgtggtccctgtaccaggccggctgctccctgcgtctcctctgtccgcaggctttctctactactgtgtggcagtttttggctgtgcttcaagagcagtttggaagcatggcaggctccaacgtttacctcacgccccctaactcgcagggctttgccccccactacgacgacatcgaggccttcgtgctgcagctggaaggtaggaaactctggcgtgtataccgaccccgagycccaaccgaggaactggctctgacatccagccccaacttcagtcaggacgacctcggtgagccggtgctgcagaccgtgctggaacctggagatttgctgtattttcctcggggcttcattcaccaagctgaatgccaggatggagtccactctctgcacctcaccttgtccacgtaccagcgcaatacctggggtgacttcttagaggccatactgcctctggcagtgcaggctgcaatggaagaaaatgtggagtttcggaggggtctgccccgagacttcatggattacatgggggcccagcattcagattctaaggatccgcgaagaaccgctttcatggagaaggtgcgggtcttggttgcccgcctgggacactttgctcctgttgatgctgtggccgaccagcgagccaaagacttcattcacgattctctgccccctgttttgactgatagggagagggcactaagtgtttacgggcttccaattcgstgggaggctggagaacctgtaaacgtgggggcccagttgacaacagaaacagaagtccatatgcttcaggatgggatagctcggctggtgggtgaggggggccatttgtttctctattacacagtggaaaactcccgtgtgtatcatctggaagaacccaagtgcttggaaatatacccccagcaagctgatgccatggaactgttgcttggttcttatccagagtttgtgagagtgggggacctgccctgtgacagtgtggaggaccagctgtccttggcaaccackttgtatgataaggggctgctgctcactaagatgcctctagccctaaattagtttcttgttgattgctggaaacaaggcagtagtgattctccgctgccactgctaccttttttttttttttttccttaaactcacgttcttaccttgataagcatcagtgtgctcacatttacctttatcactgcttcagtgtcacaaacctcggaaggtcttctaggaagaaccatctcatctaggtacaaaaggaaaaggagaagttggaggtggaaaaaaaacccttgatccgtgatcatttcagagcaccaacttcatcaccttcaggcttcagtgtactgggtaacactgaccatgtcgttctgcttgagacagatattagattttttttggaatttggatctttcatctgagttctttttcatgggcgggtcggggtcagtatcctgtttgttattgttaaatttgtatgaaccttagaaaagttattaaagtgccaaagaatgtttccctttcctaaggctagattattatgtgggatggttcgaagaaatgcaggagcgggaggaagatagggaaaatctataatggctgaagtgaaaagcaacctggggtggttgtagcatgtaaaaggagcatgttaatcaacctcttaaggaagagactctcaggctgggtgcggtactcatgcctgtaatcccagcactttaggaggccgaggcgggtggatcacctgaggtcagcagtttgagaccagcctggccaacatggcaaaaccccatctctagtgagaatacaaaaattagccaggcatagtggtgcgtgcctgtaatcccagctactaggggggctgaggcaggaggatcacttgaacctgggaggtggaggttgcagtgagctgagatcatgccactgcattccagcctgggcaacagagcgagactccgtctcaaaaacaaaaacaaaaacaaaaaagaatcttatctgattgggaccagttcactaactttggggataatttatgctatttaattatgcaacccaattctagtagaaaaattattttctaccagcttgttcagttttaagatcatggtatgtttttgctcactgtttgcttacatccatggctggcactgctgtcataagggcagcatgtcacctagttgtgccttcatagaccttaggcaaccaacttttagcaagctggccatgaaggaaggctactgttcaagttactttccactctcatttttattctggcagttcgaagaaacttccccaaatctgacaagtgaatattctcatggttggtggaaaagtgcctgatgtaccagaaagagcactggacttggaaccagaagacctgggtttggggtggtagctggtaggcagctggctgagtgacctgaggctgatgctacgctcaggcacacagattttgtaagtatattttggtacagtttgatttctgcaccctcatcatttaggttgcgtctgggactcttaagagtctgtcaccataatggatagttttctgttatttaaggttgagaactttacaaattctttttaaaaaagttacaaaagcatagacatacactaagtaaaaatgatagttctccctccaaccccactttccagagacaagcactattttttgtttgtttgtttttttgtttgagacagggtcccactttgttgcccaggctggggtacagtggtgagatattgggttactgcagcctcaacctcctgggctcaagcaatcctcccatctcagcctccttagtagataggactaccagtgtgtgccaccacacccagataatttttatttatttatttttttgtagagatggaggggtcttgctatgttgcccagactggttttgaactcctggcctggggtgatcctcccaccatggcctcccaaagcactgagagttcaggtgtgcgccaccacgcccaaccaccaaccactaccactattaaggttaagctcataaagcttttttgagtgcttagtcaaacatacatggtagtattgttttataaagacttgtgtttttctgatatgtccttttttgacctaacttttaagtcagttcaaatagagataacttttttttaagggagaaaataaatgaataaaaacccgagaaacaaacaaacaaaaaaaaacacaaagactgagtggatggtagccaagagggaagagagtaccctttcctgactctttcatcctccaaggcttgctactaagtcccaaaacatccagatcctggaagaggcttattaaaggaatcaaggcatggaactcacccctaggaaacctaccctgaaaagtttcttggagtaaagtctggagtgttagtggtccttgttctcctttgggtttcaagtaaacacgttttgcttcctccctcacttttcccatgaccatctccagcttgagtattttgtgtgtcagcaagtccttttggcttagtgttttaatctaaattagaacaaataatgtttgaaaaacaaaacaaaacacctgtactaggcagcaaattatcaaaaaacattaataaagtgattgtaggaggctgaggagggaggatcacttgagcccaacagttcaaggctacagtgagctgtgatcatgccactgcactccagcctgggcaacaaagtgagaccctgtctctagaaaataaagaagtaactaattgcatatgcttatcagtagtaggtggtacataagtgcctgagaacattgttctcttatgatattggttggagattttttatacctgttcgtgaaaattttacttcagctttttgggcatgatgaacctgctaagaattgcttgcttgatgtgaagttggtttcttgaattacctttttaaagtcctttcccctctattccttcatcttatctaacagctttgaaaaattagaacaatccaggccaggcatgatggctcatgcctgtaatcccagcactttgggaggctgaggcgggtggatcacttgaggccaggagttcaagaccagcctggccaacatagcaaaaccttgtctccactaaaaatacaaaaaaattagttgggtgtggtggcacatgcctataatcccagctattttggtggctgaggcacgagaatcacttgaacccaggaggtggaggttgcagtgagccaagatcacaccactgcactccagcctgggcgacagagcgagactgtccccccctcaaaaaaaaaagcaaaaattatgttaatcctttcagctagagattttctttggtgagaaaacccagattaggaattcagaaaaattaagaagaaaatctagggggccagctctagtcccttattccttctctatgcctatttgaaaaaaaggaaaaataaacaacttgggtttggggttgatggggagaaaataggaagggagggaaatagtatttctgaaacaatgagggttacttgataggactaataggatttttgttttgtttttgtctttactagtaggaccttgtaacccaatcttgcacagatgctttgcatcttcaaatgatgtggcatctgtgtctggggttttagaaagtacttctatggtgggaaaaagggtatgtacatgtttgaggaggacagggtctgaggaactcttgagagtcctgaattttctcttgagaacagagcttgcacttatttaccctgttcttgatctcctgaagcatttcttggtttccttcatttcctaagttgagtatcttcattgtctggtacatttcyctgaaagataagaagggcttcttagattattctaccctgccctttaaaaaagtatgggggtagaaaatataggacttggaatcaggtaagaatcccaagttccaatcctaactgtgcagttttgctgagccttatatgcaaaaatggtataatgcttagcttacaggaataatgtgcagtttttgagacaatatatttgtgggttttttgtttactttttgtttttgcgagatggagtcttgctctgtttcccagagctggagtgcaatggcacgatctcgtctcggctcactgcaacctccacctcccaggttcaagcgattctcctgcctcagcctcctgagttgctgggactacaggcgcgtgccatcatgcccagctagtttttgtatttttagtagagatggggtttcaccatgttggccaggctggtctagaactcctgacctcaggtgatccacccgccttggcctcccaaagtgttggggctacaggtgtgagccactgcacccggccatgcccgtctaatttttgtatttttagtagagacaggtttcaccatgttggccaggctggtctagaactcctgacctcaggtgatccatctgcctcagcctcccaaagtgttgggattacagatgtgagccacctcatctggccaagacaatatatttgaaggtrccaataggtaccatttactgaacacctttatgacaggcgctaaacatgtcatctcattaattatcaccacaaccctataatgtagactatcacctgcatttgatacatgaaaaaaatgggctcacagagtttaaataccttacacgggctcacatagctattgcatgccagagctggaattcaaaccctggtctttttgactctaaaacttgtygtcccaataggcatttgataaatgttagttgaatatatgaataacttaaaacccatcctttttttttttgagacggagttttgctcttgttgcccaggctggagtgcaatggcaccatctcggctcaccgcaacctccacttcccaggttcaagtgattctcctgcctcagcctccctagtagctgggattacaggcatgtgccaccatgcctggctaattttgtatttttagtagagacagggtttctccattttggtcaggctggtctcaaactcccgacctcaggtgatcctcctgcctcagcctcccaaagtgctgggattacaggcgtgagtcatcacacccggccaaaacccatcctggtggggagaaaagatgcatgaactacataagcttgactttcaatctaatttaggccagtttttcagttacctacttgggtgagtggtgaatgtgcaggtgaaccagtgcttttactgccattaggtagcctggaaaggcagggacatattcaatgagcaaagatgtgagagttggcagtataaggtcatggtgggagccagaggtttagtgcttactttagaacagcatcgtggttctccaggagcagcacgtctaggaaggtgtccctgacccggtccccttgaagtttcagggctaggatgctacggcaagcttccagccgtacacctggtgactcttcatagtggatagcccagagcagaagatccgtcagctcgggacttacttgcccaatctgtcccaaagctgcagagattagagggcagcatgtcactgaagactgagcttactatattctagcatccagaaataaattgagttttgcaaacaataccttcccttttggatggtaatcaccattagaattttagggataggtcagaatgggacattacctccaaaggattcctagaagagggatgttccatcccatccttgcctgttaggatatttgcctattttgggatgaaatatagaacaaataacatggaagacctgcctagtcccagcagggtgatggggaaaggaggcacaattatttatctatgtcaaaaagagaagcaatgccaaagattctaaaaagaaactaggcagattaaggggcagggttttaggtctgtagcagtcttgaaactgatctgacttttgcagagcgtaatagttgagatctccaaggaaagcaagatgcatccagcactggatacctacttggaacttatccttaattctgttggcagggactgtcttgtcagccctttctttaacttaagtytgacatatacctagactcaggatctttcactaaaaattgaagaaaattatctttctcttttcagacaaggaacttctgaaaagctaagatcattacctctcctrcacttcaccccattagagagtttcaggggatcatttctacttgcataggcaaaggtatttaaggttgaagagtttggggcactacttctataatacctcgaatggcaaaggccttgattttccagtaaggatctctctgcatcaggttcaggaggcattcaagcacctgggatggaaaaggcagtgttgagtggggaggaccagagcaagaatgaaccagaaacagctgggtgcggtggtgcacccctgtaatcccagcattttgggatgccaaggtgggcggatcacttgacatcaggagtttgagaccagcctggccaacatggtgaaaccctgtctctactaaaaatacaaaaattagccgggcatggtgtcacacgcctgtaatcccagctactcggaggctgaggtaggagaattg

SEQ ID NO: 9862 - DNA, 82282 bp, Homo sapiens
  misc_feature (6399)..(6399): n is a, c, g, or t
acttggtattatctgtcctttttcatcacagccattctcttagatacagtagcacatcatggtgatattttgtttcaatttaattttaataattgaaacccaaatattttgacatcaccagcctgtaggttaaacmtttattttaacaccaaaacttgctgccccttgcccccacctacataaatgcagggcgctaacgcccactttaargtcatgcaattattctgggttatccattgaatctgtagaaatcttcttccggtcatttcatcagtgtttggtacccataaggcatgtgacaagtgcttgcatcagaatcatggatgcctagccctataagtgagtattgtgcccccaagaggcattttgcctagtcattcaactgctrttgaagtccaaggctactgacgggcatatgccgtgttccattctgttcttatttcatgaaagccacattctatgttccatgaaaaacgttgttacttgggctccaaagcattacctctgcctccttcccaaactctgccatgatccagctggccaaaccccatccaaatccctcatttcagctcatgccttgygatcttcttctctctctctgggctcttcatatctgattgtaagggggaacttggaataaacctcctctacagactctttatccatctcttcatatctcacatttctgcccctgagacttacatataaaayttaagtcttacctctcargagtgaatgccatcgtctccatagttcaccattcacaactggactaggtacatatttctcaatgtaggatagctagggataattgccattaaaaaattatatttccaataagaaagataatttggaagttagaaaatcatgaggagtccatgatgtaaataagtatctctgtactttcccactgataagtcacagagctactcaagatggataatgctccagggaatggagggaaatagaaactctttaaattggatatgttgcatcttcaatgcctargccactaatggtcaacagggcagccagtatctataaagagatactactataaaaataagattttagtcattatcttctctagtcctacctttgcttttattaaatggatggattgtcacaataatattttataaagaaccacctcaaaattaagtgacttaaaacaataagatacagttaactaatgactctgagggctggtgatttagtccagcgtcatctgggcagctcttctagtcttggctggktcactcatatatctggactcttagccttgattgggatgactgatgtggctggtctctgctgtargtagttttctttcttccctgttaacagcaggatagcctggtcaggtcctttccatggttacggtgagggcaaaagtgagcargcctagttgtacagggtctcttcaagactcactgacattccatggaccgaagaaagtcatgtggctggagccagagtccgagtaggagtattgcaaagttatctagccagaaccataggcacaaaaaatgggtgaaaaactggactattttcacactccatcacacaagtaaactgagacaagtcatgtaatcagttctgctgtcaatacaaygggggtgattataacccagaagcctctcccaaattttcctaatggtttaaaatgtaataaatagattgaaaacacttaagtgcttcaaaactgttaagtgatatatrcatgtgagatcttgctattattattattattatttatattattctttttattatattcacatggttggctctaagcaaaatcctgagatgagtgatcttggctttcagcgtttctggctctgacaagtggcctcatgctttatgatattargcctctcargagcttccattataatactctacccatttttargaatcacccaataaaagaataatcaaaatgaacaaatgaatgaatgaagaytgaatgaatgaatgaataaatgaagttctcaagaaatggctagtcaacccttattcttccctgccttccaccagaatgaattgagtaccttctctgtacaaaactcccttaacctgtcattactaagttccaggaatgcaaattagaatggggacaacctcctccatggaggaattcacagtctatgggtgaaaaacacttccaaacagaaatttccttacaatatctggagaactacattggagatatgtgccaatgaaagtgagtttttatgggccttcctagagaagtaagaagrtttcaaagaargcactttggagctgaaaggaactggggggagggggtgttcccaggctcacaggaagggggtgcacattccaattcgaggcaatggcctgtggaaatgcctctgggagaggtggcatgtttggacgttgttcagtaaaggtggaatttatgaggatcataggtgtgatgggaaatgaagttagagaggtgcgtagggagcactaaagggtttacatgaatggcatgctctgattttagaatcagaccacaataaggaagttggactggagctgaaaatgatcagtgacagggaggacaacagggctggaatttcaagagtttgggtgagatataccctatccctgatcctgggctatgacaggagggatgaagtgagagataagggtggatatgacatacacttactagtgctaatgggagaatgtgattgacttgatgaataagagagttataccctcccacaacaggagcwtgaaaaggatattcagccaatcactatgtgagtcagtcaacagactgacatttactgagagcttactttgggcaaaccaagamgttagtcgttgtggagcatctataaagatgatgaagataaagacctctgacaattagtaaaaattagctgtatgtcacagaatcaaaacaagagactttattaaggaacacacaatgtgctacgatatcattgagaaaagagtgattggacytaattaacaagcattcattttggggagctgagaaacaacattctaaccctagattgttcttgcctctgttcattgccataatgaattctatttcyttaatgagaaaccagctaactatcttttattctctctaatatttgtaaaataaataagactcaaaattagagttctagaatcttcttacagaaacggctgggccagcacagtgtctttgctcagtgatggttgctttgagggatgtgcttatcttccaagggttcyttacytaagaaagattagggtaacataactaactccgggcagatagactcagggagagatgagttaagattccaggtgctcattgtctcagctttgcaaagcagtgcaagaccattccttgaagtcctgccaactaccttcagaagtgagcttttgtgttattctgttcagtatctttggttggattctccagaagcaggctttgggatgaatagtcatgttcaaattattaacaaagagatgttccccaggagagaccagcaaaggagtgaaggaagcagagcaaggaaggagaataagctacacaatgctgtgattacaggtgaactccctgctttgccttgattcagtgggggagttctggagaataaattacaccttaggccttgtcaagccttggagcaaaggaacgaggcttttacactctgggaccaatcagtctttggctatgggctgcctatggcgaacacgccatactcccaggcacttctagcttgctatcaatggggaaagtggttgcagagctcaggggcagcctttggaaggagttcccaggtgcaaagtgtaagaaacaaatggattttaaattgggtgaggagggacatgaggagtttgagggacagtgaagaggcagtgtgtttactgaattgtaggtcctattggaattaaagaattgccagtaccaaggtagtaggaaatggcctagagagaggtaatatccactgagagagtagaacccttgaaattgggatgaagggggttttccagctattgttaatgagaaagtctggggcaatcattctcaacagagaaatactgctcagtcctagggcatgtctcaaaaaatttcagaggctttagtggttgtcaaaagaatgggaggtaacagtgtcatttaataggctagagacaaatatgtagatgttttcatcctcacacmgtgaaaaagtccccagtagcayggcaatcaaatattccaccagacattcattgaggcaaaaaaaccacttacgttaacctagaacctaaccccattttacatatccacacaaattacacattttgcatggttttagcatagactgatttttctagaaatggaatggtagtgtaagaagattgtactttgttatttgcagagctttaacaagaaatgttcatccttttggcaaatcacaacactgatagtaactgtaacttgtgataactaagtgaccaaaacaacacaccaattttgtatttttttggaattcatggtgatttttttgtgagtaggtacaggaataaacttacgtgatcctcatttcaaggagaagaaggagaagttgaagaaggaggagaaggagaaggatgagaagaaaaacaagaagaggaaggagaaggaggaggaaaatgagaaggagaagaagagaaggaacagcagcagttgcaggaggaggagaaagaggaggaggaggaggagggagtgtgcagaagctggggggtaaatgcaatcttgagaaattcagcacagttccaacagtgtgtgttatgcctgggcacgaagggtcctacctcagcaagatcaagggtaaaggttagaggaggaccatcctcctgctggctggttaaatgtttttgtaccctgtctttctttatttccttcttttgagaatttgaaggttacttgggggtagaaaggaataagggctataagtttacttacttatctaaaacatacattttaagaattttctcagagccaagtcaattytgaagcaaataatttacaactggagtagaagagcataaccttctcagaggacattgacatttacctacaaaatattgagagcgcctttaggcagattacatataccctcttcttagggaaaagggagctggtatttgtggggctgatacataaaaggactaagtttctcagctgcaaagcagagtccagtgacatcaagttggataaatgctttcattaggactatggaaacgtctgtggaaacctgtgtaacccctaaacagcacattaactcarggtatgtcagcattaggtcatctctttggtcaggtagttggaaagaacttagcagaacaatgttgaagaaaaaaaataatttcctgaaataaaatgtctacagagaatgataaagcttatttgctgtccctttgaagtataattgatatgctaatcaggctccataatgagttttcttttccttctcctagtaatataaatttgtaaggaagctcgagattgatttattttcttaagcaaagggtaggcaggcaatataattgaataaagaaggtaagttagacattattaaatttgccctttagtaaaggaagcagttacttttcagctcctgcctatatttgtcatgtaggaatgagaggtctcatcttatcagaacttttgatgattcaagaaaacttggaaatttgaacactcccagtgttaaaattttctcaactactaaaaatctgctatgctacccaagcctcataaatagcaagggcatcattttatcacagaataaatataaaattattgctaaactttgaagtttttgttgtaataaagttgataattaactctgatatttaagtaaatttgatttattgctcacttttagtttagcttgggttttttccttacctctgcccacttttagtgttacgtttttactcttgatagaaagtcaatgtcaaaatcagtatgtgtcaatycctgctttgttttctagggattccaatgttggaagcatttttagcrtacaacaacatccaagtggattactatgaatgcctagacctctatggcaaacaggtcagtaaaaagaacaattcatggaatctaaaacttgtattctgtttctggtagcccctattttctagtctgtaaaggctgagataacatcagattctataaaagctgtctttgaagaactgcagaacagtctatttgaatatgaataactttaaaccatatgacctaaaattttatgcttctcaawggaaaacagaaatttgctacggtctcttaattttgctccaatacacattgtgttgtggaaaaactctcctaaactaaatttgtcctctgctttcacatcacaataatcatcaacacagaagacctctgtgaccaaaggtatgggntttttttttttcccacacaccaagcagtggataccacatgaatgtccttcaattcagttctgacactatctacccagagatagcatcagatcctacaggttaagggttcagtcccacaagaccatcccctctttccccccagtctcaagtctgggcctccaaaacttctgaccgaccagcttcaagttggatttcccactatcccttctttggattcaattaatttgctggaatggcccacagaacttacattwaccagtttattattaaggatactgcaaaggatacagataaagagatgcattggtacacaccctccaggaagctccacatcttcagctatccagaagctcctcaaatcctgtcctttgggccttttatggaggcttcatcagttgtccatgatggaagcatgagcaactgtgtcaaaatgtgattggacaaaaacagtatgatctaaayccagaaagacctgtctgttcagattcctctaggtctctccatgcagcattcccttctctagactatgggcaggactctctgaaatgagggtcttttgactcacaatcagattagagtcctgccttgggcaggtgaaagaaagtcaggagaaggccagartgagagattctgtttcctgaggcctaaagtgcctcaagagtatagaaagtactgtagaagttaggagccaggaactgtggataaaaaccaacatatatatcatgacaccacacaaatttaattcagttaaacaattcaattaaaaaatgcaaaaaattacttatcagattatcaatgattaraaagactaaaaataactactgttgatatggattctgagtgttgggttcttcttcactcctggaagtgtaaattggggtaacttttggaaattcagtttagtaatatgttcaacagtatgtatcaaatttaaaaatacatacatatactgtttgattcagcaattaagcttctagaaagctctttgctgttctgcccatgctagtaaacaaaagsaataatttaaatgtttattaatgggagaatagttgaatgggttttggcacagtccaatcagtggaatagtctgcatttactgaatgtaaaatgatgtttatttatatttgttaatgtgaaagtaatgtattatatgtgaaacaaataaagtagaatttaaaacaatggttttcttatggccccatttttgttaaagtacttatactattatgaaatggtcaagagatgaagcagagagaaggagaaagagagaaagaaagaaagagagaaagagagcgggaaagagaaagaaggaaagaatatcytatatactggcagcccttgtttggtatggtagtgtaacactgtaaaaatgactacacaaattgtttcttactatctaagttataaacagaaatgaaatactagtaaacytaatacagtcatgtgcggcttaacaatgagaatacattctgagaaatgcctcyttaggcaatttcatcattgtttgaaaataatggtgtgtacttacacaaacytagatggtatagcctgctatacacytaagctgtatgatatagactattgytcctgtgctacaagcctgtacagcatgctactgtactgagtactgtaagcagttgtaacccaatggcacatatctgtgtatctaaacatagaaaatgtagtgtgctgcagtacatggtaatggtacaatggctatgatgtcactgggtgacaagaatttttcagttccactataatcttgtggcaccaccatcattgcggtacattgttgaccaaaatgtcattacacagggcatgaccrtgtctgtttaatatcctctaatataacacattagaagcattaggaattaaagtgttttatttattaataaaaatcatagaccaggtgtggtggctcatgcccataatcccagcactttgggaggcagagaagggaaggtcacttgagggcaggagttcgagaccagcctggttaacatggcaaaaccctgtctctactaaaaatacaaaaattagccaggcatgttggtgcatgcctgtaatcccagctactcggaggctgaggcacaagaatctcttgaacccaggaggtgaaggttgcagtgagcmgagattgcaccattgcactccagcctgggtgacagagcaagacacagtctcaaaaaaaaaaaaaaaaaaattatgaagrgtagtttaaatagtgcctgccttcaggtcatataacttatgatatggagcaagcatcttttctatgccttggccaatggtcatattccctttaagtttggatgggcttccaacatgaaatcctttgccctttcaatgtcatgaaatatctctgtgagtttctttaattcaagtatttttactggcatcaccgtctctgggacatcttcgtccttcctgtcacaactacactcctcattcatgtctatacgcttgcctccactaagctcctatccagtggcaacagtaccagtgttcccagagttagctatttcttctataattccatttacattctatttgaattgcacttccgacatgacgactttttgtttttttgctgatctttcactttattggtcaattctctctttcaaktattcatttttataaaatgttacatgggtttatcactgggagacacagaggcaacacagctataagctttgctgtctgtgtctgagctgaataacaaatgtgcagtgactaattaccracagactttgaaagaggtgttgtctttggtcactgatttttgaggtgcatatgttatgtgcaaagggattggtggacagaagagcaagaagtaaagtttgtagtttatgcaattactcacagttaacataatgcagtaactgaaatttcaaacttcttaatgggggactgacttataactgaactatggcaacagaaagttttgcatattggaaccaggcatgtcaaggactgcaagcctaagaaaagcctggaaaaacatgcaataaaatrtaaagaggaagtggctgttcctgggtcttacatttccagatagttgtattttgcgttttttaaaacattcttatttgtattttaaaatttcctacaattaatatatattatttgtataatacaaaataaataacattgaggaaaaattttagtacttactttacttctataaaatccagttaattttgatgtgaatcagtaaacttaatttgattcagataacttgaggataatttagttaataaaaagttttaaatcattattttaaccttcctcactgtgaaattagttttgatttgaatgagtacatttgattaaattaatttgaggagaaaatactctattacaatatttagtctttcttttcaagaacattgattgatatgtttctccacttattcttstctattttatgccattagtgatattttacagcatttttcatataagttctccatataccaaataagtgtatttttcctactgataccgtgaatgatgatcttttctttcccattagatttttgaaataggatagctattgattttgtctacttaatcatattagttgtgwccatacaaaactctcttgttaatacaatttataactaaagtagacacatatttattatgtctattgacaatcataattacttacatgatgggtgaacttaccctgttccctcgtaaggcttatgtttctttttttyyytttytttttttttttttttgagatggagtctcactctgacgcccaggctggagtgcaatggcttgatctcggctcactgcaagcgccccctcccgggttcatggcattctcctgcctcagcctccagagtagctgggactacaggctcccaccaccacgcctggctaattttttgtatttttagtagagacggggattcaccgtgttagccaggatggtctcgatctcctgacctcgtgatccgcctccctcggcctcccaaagtgctgggattacagacgtgaaccaccccacccagccaggcttatgttttaattctgagctgaatcccattctccttttccactcaaatatcccactctgtcctgcctcaccaaatttcctcttctactgtatcattcctgtcatcatgcaaacatcyggtaaactcactcatattaaaaataagatgaaataaaaaataaaatccttttaacattctatattctttccaacttccrtctgatttatctcttttgtatcaaaattcatcagaagagtagtttctgcctgcttactctctctccttgtgcagaaaagagtttatatgagaagcctgactttaaatggcctgcttataatggaatttggatttcaggagagtctccaccaccattaaccataagagtggttcattgtatacaaactgcttacataaacaatatggttcatgtcagacacytactgtcactctgggagtttggaattttggtatgcatcagtcaaagactgtccacmtaaccagtgtccgataaaacctttgggttgtgagactctaatgagattctctagttggtaaaacttctcacaactcattgctgggggaattaaatatgtgattctactgagagagaacacttggaagcccatgcctgatttccccctagacttcactccttacacgtcttccttttgccaattgtgtttgttttgtgtccttttcctgcaatraatcataactgtaaatacaactatatgctgagcattgtgcgttctccctgagtattgtgatcttggggactcttacagtcctcacttcccattctcttttgagcccatttattaagcttttcatttcagtgtctctgtggaattcacttttatcaaggtcgtagtgacctccagattgtccagtccaatggccattttccagtcctcatcttattctatcttcagcagcatttgaatcaggccatcattttcttccttttgaattacttttgttcattgatttctagggcagcacattattctggttttmctcctatcacattggcatgcccttttcagcttctttttctggatgttgctctgcttcctgaactmtacattagagatggcagtttggttggcatgatggggctgaatgactmatttttttttttttttttgagacagagtcttgctytgtcacccaggctgaagtgcaatggtgcratcttggctcactgcaaccttcgcctcctgggttcaagagattctcctgcctcagcctcccaagtagctaggaataggcatacgccaccatgcctagctaatttttgtgtttttttgtagagatgggctttcactgtgttagccaggctggcctcaaactcctaacctcaagtaatctgcccaccttggcctcccaaastgcttagattataggtatgagccatcacacttggcctgaaagtctaattctgatggctcaagagaagaagaagagaaattaaaggcagtatagagaaagaggagactttttttttcgcaaagctttagtacaaaggggaacaaaactgacatactaccagaaatggaaattggaacccagaaaacatttttaagttgtgagaaattacgatatgtttgaatgttgaagggaatgattcaattgtgagragggtaaagacaggatgcaggagagagagaaattgcgaatatccaaggcacaagcagagggtttatcttagatgagaggaggagaaactttatctttaattagcagaaaagaaaccaggatgcatgggcccttttgcttctaaatttgttaaagtggtgggaacttaaagagtgttttagggtgcttcaattttggcattaaaataaatgagttatgagctgagagtggaataaaaggcacgctggaactttaaggagcaagaagcctatggaagtaaaacaagctacagaacttagtgaaggataaaacatggggagtgagggttgtatagatttccactaaccttctctcgtgctcctgatggaaatctttcccaaaattgatgtcagtgagatctgctttgtgactaaaaaatttgttaatattaatttatcaatatcactaatatcagtttatttkttcttaatactgctagtgtgcaacttacctgaaggcatatgcaatattttgtaggccaatttaaatgcagtcagaaggattaagctcttctactttcattctatatcatttgatttagaactgacttggtatgatgcaagaagaaatatatatttaatctcttccaggttcctggcacagagcttctaaaatcctttagaagatggtagggagtgaggaacatctgttgttataatattctatcttagtccctggcttcttatagaatagtttctaagactcttggaatctccagagagaaataaaagtgtctttttttatgctaatgagrtgactgatggcagaggttcctagatagctttaggaacggggctggtcaccagaaagaccaagacatgattagagagttagaacttttaaccttactttctgacctctggggaggggacaagggttggagactgtcttaatcaccaatagccaacggcttaatccatcatacctaattaagcctctgtaaccctgaaggatggattttggagagctatcaagttggtacaagagaccatatgccaggagggtggcatactccaattccatagkgacagaagctcctgctttcaagaccttttcagatcttgctctatggacttcttctggctgtttttctggatccttgagaatatctttcataacaaactggcaaacataagtaaatatttccctgagttttgtgagacattcaacaagttatctaacctgatgtgggaagtctgggaacccttaatttatagccagttgattagaagtacaggacaacaacctgggacttgcagttggtgtataaaattgacagaagacctgagggactgagtccttaacctggggggtctacagtaaatatgggtagttaatgtcaaaattmaaactcagttggtgtccccagagttggagaattggttgatgtcttagtctgttttggctgccatagcaaaatacctcaaactgggtaatttataaacaatagaaatgtattgctcacaattctagaggctgggaagttaaagatcaaggtgtcagctgttttggtgtctaagggcccaatctcttcttccaagatggtgccttgttgctgtatctgctgtgcccacatgtggtgaaaagcagaagagtaagagagccctcccttcaacccagcatccttttatraggatgctcattccattcatcagggcagacccctcatgacttaatcacctcctaaaggccacaccacctctcaatagtgttgcattgacaattatgtttcaaaataaatttgagagggaataccatcattcaaacaagtggttggtatgaaaaagaaaccttacaaatttggtgtcwgatatgttgtaaatagtagataaactgtttttgctgttgctgtttgtttttgttattcacctggctaggacaacrttctcaaagattttgaatttgaggggatttgtagtgaatatgcaargatggaggaaggcacttgtatatccaggtgtggaggtcagagagatgacgtgaactgttgctaaaactctaagtcatttgcttgtaggtagtccttaaaactctgagttgtaatacttgagcaagactaaactgggagagtaaatgccttgctgaccatttatatttacyggctggggaaaagagaatgaatctgcaatgaactcagaaaaagattctgaagaggtaggtggaaaaccagaaaagtatggtttcctaaagcaaggggaagatagtactttaagaaggaggggactgttaacaactccaaatggggactaaggcttatatttgatgacttgtgaaaaaataatctttggatatgtgctcagatagaccattcatgacaagaacaatttcaatgaagtcacagggaagaaagaaaaattgaaacacattttgcttttattcttcaaaatgaaatgccgctaccacttggatacacagagatccaaggtatatggaggccaatgtaaacaattcttcaggaaatccgtgaagttgacaagaaggagagcgataaaaggtggagagaagatgttggtctgaggggagttatgttttaaatgagaagacttaagttatgttttaaatgagaaactattgggaagaattagatttagagtgtaaataataaagcaaaaaagtttaactgtcaatataatactcctgagaagctgggaaaggataggagttcaggcaggggttgaagtcttggccatggttgggaagagaggcactgctccccttgaaatggaagagggtggagagggaatgaatgcagatgggtgcagatctgatatcccttcactcctcgaatgtattttcagtagtaactttgagccaggcactgtctgaggtacttgagatgcctctgtgaataacagagtataagatcttaaagggcttacacattaaaaggtaatgtcgctgcacttttctctgagaagttgaaggtcaggctattgataggaggaagttggcagggagttgggaaggcccagtgggaaaatgtagaagccttgtcattgaggaccagacagagaaacttggcaggatttttcaggsattgttgaggccgttttaaagttgacatctttgcctatataggaaaaycattgtgtgaactgtcatgaaactttcctgcttagcttggctcttagacatgtctagaaaaagcaaagaggaaatgttagctaaaaaagactctcctgcaattaaatttattttcctccctttgtttagatgccagattttatttctaatacctgtttatgttttatttccttttgtgcagttgacaacagattatcggctgaattagtgtgtttgaataattttctctttttcctttttatctccaatattgtttttatcttgattagttcaactctaattaactttgtgttcattttagtgctttttaccctcagcttcttttcttgaatacctaattaatttattttaatttttcttgcttaataatagaaagcattttagactatacttttttctgaggacaattttagacttatgcagttgattttgatacataatgttctttaatttataaaatgtttttaattgtactctttaatcttttcttttgtctcctctccaagaattattaaaaacaargtttttggatttccagttagttagatttagctatggttattttatccttattgtatttttagttttattatggtatggtgaaagcatgtargtcgcacaattcccacatgatagaattaattaaggttatattgatatctatatatgcaattaaactttgtagccattacactgatagacatttaaaaataatgtattttctttatagggtaaaaatttagataaccattcctttgagcttctaatatatgcaaggttttatattaggtactgggaatgaarggagaacaagacaggatttctgtactcatggaacttatgttgtagtctaaaagacaggaggaaaaagcaaatgtctactaaaatatttacaagcctctataagtgttttgaaagaagaaaggaataaacgcasagaccaagctgcactcaatttgtatagggttatctggaaaggctgtctagaagaactgacactctggtggagtcctaaaaaactacaggctgctggccaattagagctttgaagagagatcatttgttagagggaaaccaggagaggaaaagagatmtggggatactggcaagggagtgattacattgagaagtcgtggacatagagttggacaggagagaataaaaaagttatggggtccatattttggcagtctctgaagagttaaggaattgtagcagtgggggtttatgagtttgtgagtgaggtagagcaaagatggtacacagagattaagatgtttaaaattacgatttcagaaatagtgcagtttctgatgatgacaatatttaagatgtgaccagtggagtgggtgactaagttggactagagaaaagacattgatggtaaagaggtaaggatccagctgtctgcggtgttggagagttcacctatgtgagataactgcagaacttccttcgggcrgagaggaacaccaaaagccaaaacaagtttattgtctatattattcagaccctctgtatttcaattaaattttatttaactgattttttgattctcagagacatgttaaattttcctactatgattgtgatttgtgctttacacagttgattctccctatttaaggtagttatgcaccattaatatggtgcaaacacaattagcaaacactgaaacattgctcctaggggaaatgttgtattaagttcctgcaagctactggtcatattttcatcaactaaccaatatgcaattgtgttttacatatgcttctgcttaaagacatcttatcwtatatatatatatatatrtattttgattcattaatattgaatggccaatggcactataactcatgccttaacaaagcttatcttacacacatagtttctccgtagggcacattcaagctttcttgagcttagaagcatgagacactaatcttgggggccactttaaacagttaatcaataagaaaaaagcacagaaatgtaaaaaaaggtgctaaatagaccacaaaaaagacacttgtttagagtatgagaactgaaataagaaggtagagcattgcttagtttgaccacagcaaaaacttgcacattttttgctgctctgtacttgtcagtgaatgactgaaaatgtacaagtattgattttaggggttgcaaatacattttagcaagtagacaaacacaattattgacttcgtgaataataaaaaacaactatgcatttttagattgttaattgttagagtcaggactatactattttcaatgtgtttttaaaaataatttggaaaataaaatgaaccctttggctcaaattaaacctttctgtctcaaawtttattttggctagtgcttatactgctattctttatttgcttgttgtttatgtgttgtttgtattttcatgaaatacacttctccatatagctgaattttgttttgttgttttcttattttttaattaaaattttaaatttaactctataacttctttttttatttgttgtcataaagttctctcctaaattttattcttgaacaatctgaaaatcactgtcttataacaaayagctataactaaaatttttataattgttatggctgatacttctgtggcactttatagtctgacttttggactgccagatttgatargcagaacatttctattggaaatgtagtgccccatgcctcatgtcttgttctaatcccatccctaccagtcccctcagaggtaatcagcttaaatgccctgttttatcattctcctttgtttttcatttatcacatatatttttatgcctaaacagcctgttgcttcatattgaatgttytaaactttatatcaacggaataaaactacctgtatttttctgtgacttactttttttggcttaatatcatgtttttgagggtcatccaggttgatatattcaattgctcatttttactaaaagccgaattatgcaacttatttatccaatctacttttaccagaaatttttgtctgttttgtgtgtgtgtgtgtctgtgtgtgtgtgtgtgtgtgtgtgtgtgtgtgtgtgtttgcaatgttataaacattcttgcataaatctcttgaggcaaagctgtaatggtttctcccagggtatattcctaagagtgacattgttgggtcacctttaacttccttaaacaatgacaaatttttctcgaaaagtcttgtttccttctgtgggaaatgcctgttatgtctcttgctcactgccttttcattttgagttgcaggaagagaatagatggatgaatagttggatgagtggatgaataaatgaatggatrgatgaatgaatatagatagacagatattctaatattttgggtcagtyttatgtgttgcaaataccttacagtttttagcttgacttttcactctcgtttctgtcttaaaaaatgtttattgtatacacatttacattattatatataacacttactatcctatagtaactcattaattctcatctcaacttgatgttatggatactattatcaaccccactttacttttgagggaacagaggcagagagcataaaaatagcccaagtttttggtggtaagtgacagaaccaggattcaaagatgagccattactctctagagtatgatatactaacccctattctgtacacttctctatgatggacataaaaatcactttcttcgggaggctgaggcaggagaatggcgtgaacctgggaggcggagcttgcagtgagccgagatcgttctactgcactccagcctgggcaacagagtgagactccgtttcaaaacaaaacaaaaaaatcattttcttcaatgattgcactttccatgtcttaattaagaaaccctcccttatcccaatgtagtaagtaaaggtttctgggctgtctctgagaactgttttgcctttcactcaaatttttagtccattgaggattttgtgtgtgtttttgtgtgttgtgtgtatgtgtgtgtgtgtgtgtgtagtaaaggattcaatttcttttttttttaataaggataactgttaagtgctgatctatctctactgatgtataatatcacttctgcaataacatagtaggattaaaactactagaaataactggaaaatataatggaaaaatctaccatgtataatatataacmatatgaaatacttaaaacttgtataatgaaacctccaaaacactgctgaggaaaattataggagacttaaataagaaaatagatataccatttttaaggatcagaggactcaatactgttaagatgtcaattctgcctaaatagatctatagattcaaattgactccataatctatctagctgttttcacagaaagtcacaagctagtactgccttttactttaaatatttttgacataatgttttctatatactacaatatttagggattatagaaatacaattaaattttccatattgattttgttccagcaaattggctaaactctgttattcattctaataatatgcctatagattttggggaaatttctgcaggcaatcatattagctctgaattatgacagctctatttctttccttccaatttttatgctttatagcgctctttcttactttacttcactaggtaatattgaatagaggtggaatagcaggcttattttttttttcctgttctgaaactctttaaaatctgcacataaaattagatgctgttgtagttctttctttctttttctttctttctttctttttgttatcaaattagcataatttctttctattcctaatttgctcaagagttttttcaaataaaggtagtgaatgtaagcttaatttcatgtatcatcctttctatacgtatatgtattgaggtgatttaatttttttttgttataatctttctttctacccttacttataccttctctaatgctctttctttctgacccatatcattttcccggtctctgaggaaactttgtttgtttgttttgttttgttttgttttgttttgagacggagtctcgctctgtcgcccaggctggagtgcagtggtgcaatcctggctcactgcaacctstgcctccagggttcaagcgattctcctgccctagcctcccgagtagctgggattacaggcacacgctaccatgcccagctgatttttgtatttttagttgagacgggrtttcaccatgttggccaggayggtcttgaactcctgacctcgggtgatccatccgcctcagcctctcaaagtgctgggattacagacrtgagccaccacacctggccaccttttttttttttttttttttttaacatttcttgcaagggaggcctactggccacagattctctcattttacttgtttgagagtgtctctgtttctccttaaattttgatgatyaatttcgcaggatacagaattctaggttggtgggctttttttttttatctcagtacttaaatgttttgtccatttatttctccttatttgcatggtttctgataaatcagatgttatttttctctttgctcctctatagataagtttttttcccctctggcttctttaaaggttttcttctttatctttgattttctgcargttaaatatgatatgcctaactgtggttttgggcatttttccttcttggtgttctctgagcatcctgaatctgtggtttcatgtctgactttaatttgaagaaaattcttaggcattattgctttaaatatttcttttatttctttctctctttattctccttctgctattcccattacacatttgttataatttttgtagttgyttcagggttcttggatattctagtcctctttttttggtatttttttctttgcttttcagttttggatgtttatattgacatatcatcaagcttggaaattctttcctcagtcatatccagtctaccaatgagcctattaagtcattcttcattcctgttatagtatttttgatcttccccattcccattttactctttcttagaatttccaactctctgcttacattactcctctgtttttgcatgctgtctacttccattagagctctcagcatactcatcacagttgtttaaaattgctgatctaataattccaacatccctgccatagctgactctcgttycagtgcttgttctggctcttcaaactatggtttttaccttttagtgtgccttgtaattttttcttgatagccagacatgatgtttttggtaaaaggaaccaccgtaaataggtgtttggtgatgtgtggtaaagtttggggagaggagaagggtagaaggttctatagtcccatgattaggtctcagcctgctttaagcctgtgccctggagtgtgaacccaaaagtgcttctcactttttcccctagttagctgggacaggatggctagaggggactggagttagattttttccttctctcagataagtttggttttggtaaaaccaccataggtttggctttggtaaaatagtttatcttgagggcagaccttgttaagaatagagcgatctatttcaaaatggctatttttcccatccccatgttaaaagcagaggaaaccttttttttttttttgatacggagtctcactctgttgccaggctggagtgtggtggcatgatctargctcaccgcaacctccgcctcccaggttcaagcaattcttctgcctcagcctccctagtaactgtgattacaggcacgtgccaccacacccaaytaaaatgtatttatttatttatttatttacttttgagacagagtctcactctgtcgcccaggctggagcgcagtggcgcgatctcggctcactgcaagctccacctcccggattcacgccattctcctgcctcagcctcccgagtagctggggctgcaggcgcccgccacyacgccyggctaattttttgtatttttagtagagacggggtttcaccrygttagccaggatggtctcgatctcctgacctcgtgatccacccgcctccgcctyccaaagtgctgggattacaggcatgagccaccgcgccaccgcgcccggcccacacccagctaatttttgtatttttagtagagacggggtttcaccctgttggccaggatagtcttgatctcctgacctcctgatccgcccgcctcagcctcccaaagtgctaggattacaggcgtgagccaccacgcctggcccaagcagagggaactttaagcattactatgagaacctagtagagttacttgaggtaaaactcacaaaagtatggatgtcccccaaaattaggccccctcagagttttaaactctcagcttgtccacaatgagcctccaaaaattcatcacttacagttcagattttcttgctccaatactggtcctcacagagagtttttaacctgtgaatctctgctttattaaattttgattctctgtatccaactgtctgtctgtccaatttttagggcagcagtttaccctgtgacctaaattctctgatagaactaattgattttagtttaacttgttatgtattgttaggacagagtgatgacttccaagttccttacatgttagactggaaaccagactcttaacttgttaatacagaatacagtaaattttattatttatatgtartaaatttatatatttaatatattaaaagttacatatatattatgtgtatatatataactttttaaaccagcatcacrttcttgggacaaatataaattggttgtgatacaccctttttgtatattgctcaattcaatttttggaatttttctttcaggattgtatacttatgttcatrggtaagaattttctgtaaatttccattccctaaatcttgtttggttcttgtgtcatgactatgctaacctcataaactgttgggaaatattctttcttttgctattctctagaacagtatgaataatattgaattatcctaatgtttgttagaacttgtccacaaatctgttaggatctgatattcttgttgcagagaagctttaaagtgctgattccttatctttgatggctataaggccactcagatttcctattactgttgagtcagtgttgatacatcatcttcatgggaataggcttattttgaattttagggggatarcatcctcctatgttcttttgaaatagctataatagttagagttatgtctccctcttcttctttattttgagctttatgataattctttgaagtctggagtatggtaaattccctcagacactatctgtttctgcctattcttakagtgtaggaactaacaaacgaggaacacttctttagtagaaataggtgtccaccaaaacatttccttcttcatcctggatgcatagctagactacatttcccagcctctcttggggttgggtgtggccttgtgcctgagttctcatcaatgaaatatgagtggaatggagtgatgacccacttccaaacatggaatataaaatccatactaccaaatgaacaccacccatttcagttcccttttgctgtgtcacaaacaatccccaagacctggtgccctaaaataacaataggtttatttatttcaacagtcagttgactgagccagactttgctggtcctgtctgggctcctcacatgactgcattatggtataagctggcaggggctggaaagcccaagataatctctaccatatatgggatctttggtgctcactgtgagctgggatgctattattcccctctttgtgacctgtctctctatgtgatgacccatacctctggcctctacctggcctctttctccagcaggtttgcctggacatccttacaacatggtggttgagcccaacagggaaaatgtagatgctgccagtccacttaaggcttgagagagaagttctgtaatgttgcttccaccacattctattggcccatgatagtcataagttcaatccagattcaaggcataggaaagtagactccrcctcttcaaagtcatattgcaaggagtcatggggacagggagacatgattcaccaggggccatttttaacactctaccacattacctctgacatctccacacactcctttttcccctgactgacaggtagatgtagatgctcagggaagcyttatgagccatataatgaagataggggggactccccacctccagtttccaacctgtggcrttgaatgtggtgaaagcgataaataaatgtgcattgtgttaagccactgatatttcagggctttttttaattaatattttttgtagagacaaggtctcactctgtgacccaggctggagtgcagtggcccaatcatagattgctgcaacctcaaattttggggctcaagcaatattcctgcttcagcatcccaagtagctgggactacaggagtataccactgcatctggctgtttgtttgyttgtttttagagataggttctcactatgttgctcagtctggtctcaaactcctggcctccagggtttatttagtaaagctaatctaaccccaaaaatgcagccttaagccaagttcttagcttgaggcttttcagaccatacaggtaatrgtaattaggttgcagacttatgaaaggaacaagctgtgactcacccaatgctaaggtctcagattatccacttttcttactgatccatgtggtgtgaagcattggggaatttgtggaggataggcagtaaaggcagcttcccacctccccaccatttatctttgctctgggcatagccctgtgtggatcgcattgtatgtgtgtaagctctggctttgtctcctgatcccagtcagctccatcccccaactagattttgagaaccaccaaatctcaaatttccttggacttgtcaaatgtccttagcctgaagttggccttgactgtctgctggcctgtccgatgtactattttcaattggtgtttggcccctgaaaagtccgcacttacttattaagtcagcatgcatctaaaaatatgttattcatattttagctagcattttacattgttttcagtatgagggtcagtctgattttgtrattttcaatagtcccagtaagagaactgggcatttgtttttaaaggcatttaaatttataataagtttatgtatttttcgtaacttctataaattaattcgtctcattttgcttttgtgartttcctattcacatcctctgctttttttgctgttgttattttgttcttttaaactggaaaatagtaccacgagtactctaagaaacgtcctgatgacattttcactyactgtgacctctggtggctaatttacatttcagaaccatgagtaagatcaagatggacaccacccccacttttccctgcccaaggagacctattgaacaagcccattcttgccttcaagccctgcttctcagagttaattaaygtttgtttcattccactagattctcttctatttcctaggcagtctggtctgctatgaattttargtttatccatgtttccttcaatttaacattctcaacattaaatatatatcttagtctgagagctcccaaaagtagaccttgagacaaggattcaaaggcaaatatttatttgggagatgattccaaaaagctggatcatacatcaaaccaaactctatttgcattatgaaaagaatataaatgtagatgtccaggacagagagattatagtcaataagaattgggttctacataatggtcagataaatgcttagtcccttargctgctgtagcaaaataccataaatggaggagtggcttataaatagtggaaatgtatttctcacagtcctggaagctgggaagtccaagatcaaggtgtcagcatggtcaggttccaacttcttgttgtgtcctcacttggcaggaggggcgaacgagctctcttgggcctcttttataarggcatgaatcatatcatgaggactcttccctgtggtctaatcacttccccaaaggccccaccccctcatttagtcaccttggggattaggatttcaacatatgaatttggcgggggcagaaacattcagaccatagcagatgccaaggacaaaaggattaatgaacagcattctgttttatagtcaccaagktaataataataataatacttatcaagcatttaccgtgacattttattaaatttaattgatttaatcctcaaaaatccaacgagttagctgtagcaaaagaaagaaagkaaggaaggaaagaaggaaggaaggaargaaagaaggaaggagaaagggagggagggagagagggaaggagggaggaaggaaggaaaaaagagggagaaaggaaggaaggaagagaggatcaaaggcaaaataaaatatgtatttaatacaagtgaatttctagatttaatgttttatttggaaagaaagaattgaaattcaggtcatatacacagacctggttggtggtctttggtgtgtctgcagaacaaagaggaggttggaaatgttatattataaaaaggagaatcactacatacgcctctttcagaaagttcattagcactggtaaaatttgtggggagctgggaagctctgactggtgagtgactctggtgggtaaaactagactttgtgttgcacccccttgtttcagaagccattagataaaactggtttcaggttacagtaggcagttttagcagccaagattgcacagaattacagtcttagagcaatgttatgttcccggagtgcttttcctcactggcctcttgactctgctttagatgaccgtgacaagaatgacccgatttcatctgatcaactttcatagaaggaaggaaagaagaaagggaggaagaaaggaaaacagggagcytagagaaaggagggagaaaataagaaaaaaaaaagagagagagaaaggtagaacctggatgtaagccagatttctcttttcttcattctaacaccccagttgacataagggatttatttcgggagcacattatgagatctaaagacaattccattagagtgtatgggtgtgtrtttacttgtaacagctcataaatctttgaatctacacatggagtgtgtgaggtttttgttccacacctcccctctcaggtcccatattacagaagctagcattttcttttaactttatatctttggaccagacatagatgtaactgttaactctcccatagtcttttaagagtttcttgctctcggaggcttattccatatttaaaatagacytaaaatagtattcatgtaatttttctactaataaaaggaagatgatctaaataatcaagataaaatgagggtatatgaatacgattttagaaggaagtgatttgctctttttattttaagcatggaagtagaaagataggtagaagaaagaaatcaccgaaggaaattaaattagggaccaaggaagggcaagcgcataacaaccagcttaattataataatttctagaagctcattgtaggatgattttaaaatattaattggatcgcaaccaatctgacctagtatgtcttacataagcagctggttagcaatcggtctraaatcttaaagactgtcaagagagcatctgcaatctgttattagtgrggaaaatataaattattctgagccgtggagtatgtggttgccactgagtataccactattagatattttagagggaataagacaaatggcacaattaggagaagcaaaaccttgtaatttaagaaaaccttgagatggatttttcatttcgtacacaggctaataattaaagtctaatayacagtctttattttgtttttgtgttttgatttctcatgttggctggtggttactgtacttggcctagattaactttttcctcctatgaataaacatgaattatctatgaggcacatagtacttaaaatgacctgcagtcattatttagtcaattcctgtagcacaactttaagctttttcacaaagtgagtgcagtgtgtttgtatgggtttttaattgattaataccttaccatttaaaaaataaggatttaatgtaattaagttacttcagatggttaaaaacagtgctagttaaagtgtggtccctaaacccrcaatgtcagctttacttgggtgcttgttgtaaatcagaatctcaggcctcacccagatgtactgattcagaatctctgctaggcaaggccctagaatctgcattttaaacaagctctccaggtgattcttacatacagtaaaagtttaaggcacaggacattagaactgagtctgcaaacattttctgtaaatattcataaatattttggactttgtggacctaaatgggctctatatgactcagccctgccactggaggagtggcagccagcgacaatgggtatggctgtgttccaacaaaactatatttacaagaacagactctgggccagatttgatgcataagccataatttgccaacccctgggttagagcctggagtgtcagttgttgcaggttttaacattctgtttggaagtttgtagatggaggtaagaagaactactattattaagtacctattgtgtacacgccatctcatatttacccaaacaacctaactaccattaccacaaccccaaactaccatgaccagccatgcaggttatatactgaagaacaaccgttggtggaatttggaattatacagtacacaaccaggacagcattatgtggggttcataggtttgcatcaytatcttcatcttacagataaggaaaccaaaaatcagaaggatttaaaaatttgcccaaagatacattggctgtcagtgtcagaaccaggattaaacctggatttgtctgattgtggaggctgtgctctatccactcactctgttgaagacaggtaacataactgaccctggccattggccgtatgtatttatggtcccggtcatgaatgcaaaaatttaccactggatattggaagactgagaaagaaagaaagaaactggctggacaccatggctcacgcctgtaatcccagcactttgagaggccgaggaaggcagatcacttgaagtcaggagttcaagaccagcctggccagcatggcaaaaccccacctctactaaaacacaaaaactggccaggcatggtggtgggtgcctataatcccagctacttgggaggctgaggcaggagaatctcttgaacctgggagatggaagttgcagtgagccaagattacaccactgcactccagcctgggcaacagagtgagaccctgtctcaaaaaaaaagaaaaaaaagaagaagaagaagaaagaaaacatgtacaaatgagaagtcactcaaggaaacatcttcaacaataaatgaaaaaaaaaaccctcaaaaattgctytgggtcaagatagagattagtattacagcaggatgataataaactcattctatcagttagttattgacacataacaaaccacccccagactcagtgaatttattattactcttctgttcttggctcagctcactgacgtgtctggggttagccatgggtgacgcagcagctctgctggtctttgctgaattctccttcatgtttaagggttggcaggctgtagactagtctgggatgatctcagctgtgayaactggactctcttccatgtggtcactcatctcctcacaggttagcgcagactttcagttatggtggcagcaaagtttcaagggtgagaaagcagatatgtgtacatcttcttgaagctaaggcttgaaactggcacaccatcatcaggactgaatctcctccaatcaaaagatataatctatttccccaccttttgagttttgtctggccttgtgatttgtgttctccaaaagattgcaacagaaatgatggtgaaatagtctaagcataaccttcaagtggtcttgacacctgtccagycactatgcccaggctagcctgttgaaggtgaggtgccacatggagcagagatgggctaccccagactagccagccccgacccacccacagctgattagagatgcatgagtgaggagggtgagaccagaagaaacaccaccctgctgagcccagccaaaattgtcaatccatagaatgctgggctaatcactaagtttaggagtgtttttctttaatggcacaaaaactgactaataaaagtgtcttacatgtaaaatggccaccatttactgtgcatctgttttgtataaattttgaggtgagtagtatttaatcttgtacttcaatttgaacctcaaaaagttgtataaatatcaacacaaatcctgtagtttgctggtggatattactgagttttgtctggccttgtgatttgtgttggccaactgattgcaacagaaatgatggtgaatgagtctaagcatagccttcaggtggtcttgggacctgctcagtcactatgcccagggtagcctgttgaaggtgaggtgccatatgcagcagagatgattgatgtttattgattcaacaaacakctccagaagagcactgagaagttgtcaagacataattcttatctgcaagaaatcatggacctctgggtaagaaagctccataaatagatacatgacaatccaatatgatgcatgttgacatacagctrtggaagtacaaagctgtcagagaagagggtgtgatttactttgctttgagaaattgagggtggcttttcagagctgtttcctgggcaagggaagtgaaattgcaaatagagtaaatgacatgtgcaaaggtgactcggttctaaaaaaactgatgggttaagaaacaacaaggccggaatcaatgaaatttaggagcctcttcaagttccagggtaatgagctcctcacttttccctgtgtttatctcagccttcagagtagtaactgcattcttcagatattctctgaattacctcaaccttagaattggcaataaccttgaaactgctaatatctggttttagctcagtgcccccgttgtgctctttctgctttctaatctggttacaaaagtttcctttattaaatcctctctgacaatacttagtgtagattcttttttcctaactagagcttgacagatctagttttccagggagatgattctgagacttacaggaaaatcaggaggacagttttgaacaaggagtaggtagggagaataggagactgaaagaagtggaaaccaggacactaatgggattttgtccaggatagagtcataaagaaccttaaccaaagcaggtgatgggagagaacattcactccagccccaaacgaagaagccatctttgatccttctttttctctttcaacaccctccatgtgctctccctcctccccacacatgattgcattagmaggtactgtcagctttctgtacaagaatgtgccaaatctgacaatggttcatgacatctgctgcagcaattctagtctaagccaataccattcctaggcttgttggccacaaaagcttcccactttctcctgtaatcactcttgtttcccatatacatccattatccagatagcagccagagtcattcttggaaaaaaagataattcagaccatattgcttcctgcttaaaactctctgagtgattcccctggtaatagagataaaatggaaggctgcccatgcactggctttgcctgcctctttggagttatcctatacctctctctttctttgccattgtcctccatccccactgattttcctgttccctgaactcactgagccacgtcctcctctgagcttttctccccctgcctagaactctcttctgctctgtatcctatggctattttattgacacatcccttcagcatgtgtatatttggtgtcaatargatgctttcttaatgttttaaagaagttaacttctgtttgttttcatcattctggtctcagttcagacatcatttgttcagagtggcctgtcttctctttcctttctgatgtagattccacttaccttttcagattccattatatcactgtttaatttccttcatagcatatgtctgaataatcccatctcctttcccaatttcctttcttcctccctctctcctcccttttctttccttcttcctttcttcctctttccttccttctttcttttttcctttktttcttccctgttcttgttttttgttgttgtttttttttttcctggcttttctcactatcatgtaatctgcacataaacaccccaagacagcaacctagtaaaactcaacaagcagtttctgaagggatgagtgaacagtttgaagagatatttttgaggtggattccayaggctctggcaactatttgagtgtaggataaaggagaaacagaggacaacttctagatatcttgttaagatcrggctgcttatggtggttgatagatgacaatgctatcaaccagatcaggactatcttcggagagtacattttggrgagaaaaagatgaaattgatttaggactattagaatctaatatactttccaggatacctgggagaggtccgctgcagagtgaaaatttgggtctagacctcagggaagcgsggaaggctggagacaaaagcattcatcatcatcatgrtagacaaacatctatgcaaatctttataacttggcaatctgttatagcatgtacatttataaatataaacattcaattataaatatattcatagatatatagaaatatttgtatgagaacatattttataaatataattgtaaaagagttttacattccaggacaacagaaagagagcataggccaaatagaaaaaaaaaaaaaaaaaaggtttttctttttattttagagattttagaatccttttagaatcatattactttgaggctagttccaggatatacctgtgtcagcattctgacatttggtattataataaacagtttgcatttttgttactttggttttatgtccatttcttggtccttctgagaatctgcagttttaagtcagggacgtttgagtggaattagttcagcaatcctacttgtctcctctgattttcctgccaaataaatcttaccagatcatatgcaaattgatttaaaatccaaagtgatacatgttatatttgaatgttctcgtggtagagaaaaagaggcttccctctgttttgaccttgagtgttagagaaagagacattatttcactgtttggagaggacattggggtaaaataaccacagctacccttaagtgagccactttatcacaggtctttaatgcattttgmtatttctaatgtaacatagttttttcctaataaacttgttacaaggagttaccasctgacatgtgtcaacagtcaggtaagaacccttcagcgtgtgtacgttcagtgtcaataggttgcgttcttaatgtttgaaagaggttaccttttttcttttagtacactgaatacttttcttgaaatagatttttataactaatttatttgaaaattccaattttctaygttgaattcagcaagtgtttacttcctgtatgttaaacaatgcactgagtatagcagaaggtggaaacgaaaatgacacytasaccccagcctcctagactaaraatgcaagtgtctgagtcaccacaataccaggtatgctacaaacgcattatagttaccacacttatattatctcaatcaatatcggatttattcagcaatcttagaagtattattattcagaaaaggaagaaggaagagaaaaaataacattgcaattaagaacacaggctgtacatccagattttctaagcttggagtttggcgtattaatcaaagtatcatctttgctgtaccaaagattcytgaggttccagaaactcagcacagtgtgatttcacccacgtgccactgttcagtgtgagtgaagaggatcttctggctctctctgctcaaagaggtgaytcagaggtccagtcgcttttcatggtatggctttgccatctcggggccatttgcttctagagagagagagagaaagagggagaaagagagagagtgaataaaaaaccatgcttcagaaagcagtgattaggccagataagtgacyttcatcacttctggccacattccaytggccagaatcagtcacgtgactgatgaagggcagctggaaataaaatcttcctgtggcaactggaaggaaaattaaacaatttagttaaacatgacatcatctttaccatacctggctctaccatttattaacatataagacacaaaactttctgttgcagttttctcatccataaaatggagatagtaacagtactaactctgaccacataggattgttatgaagattaagtgaggcagtatatgtaaaatgcttaaaagagtgcctggyaccatatataccatggaatactatgcagccataaaaaaagatgcattcatgtcctttgaagggacatggawgaagctggaaaccatcattctgagcaaactatcgcaaggacaaaaaaccagacactgcatgttctcactcataggtgggaattgaacaatgagaacacttggacacagggcagggaacatcacacaccagggcatgtcargcgtggggggctgggggagggatagcattargagaaatacctaatgtaaatgactaattaatgggtgcagcaaaccaacatggcacatgtatacatatgtaacaaacttgcaagttgagcacatgtaccctagaacttaaagwatatatatatatatataaaaagagtgcctggcacatagcactattcaagtgagctattcctactttatatgtaaataaaattactagaaaggagatatgatggtccataggatttcagagtagaataagatcatctttatggcrggggatacatggtaggcataayggcccctcaaagatgtccacatcctaaatcatgtagcccatgaatatgttatgtgacatggcaaaagagattttgcagacgtgattaaggctataggccttgagatggggagcttatgmtgaattatctgggtgggcttaatctaacagagaacattctcagctggaggcagataagatgaaacagagaggaagtcaaagagaattgaggcttcagaacaactggatttgatgatagagggttcagggacctcagtactacaactggaaggaaataaattctaccaactaatcaaaagggctttaaastcgatttatccccaagagacaagagctagtctgggcaacaacttttccatttgtcttctgtgagatcccaagcagagkatcaagccaagcctgcctgaatttctaactacaaaattgtgagataattgtgtgttgttttaagtcactacgtttctagtaatttgttatggcagcaataagacactaataaaagggagaatcaataaagtagtcatgatagaaaagacacttgaasagagacttgattgacaggcagggttttcctgcttaaataaagtgggaggacattccagataaaagaaacagygttgagcagaggaacagggaaggtagggtgggagtttgttagagttgagttccatgtgatattaggaacttatgagcaatgattaaaaattggtagcttgggccaggagcggtggctcacgyctgtaattccagcactttgggaggctgaggcttgtggatgatgargtcaagagatcaagaccatcctggccaacatggtgaaaccctgtctctaccaaaaatacaaaagctagctgggcgtggtggcgtayacctgtagtcccagctactcaggaagctgagtcaggagaattgcttgaacacaggaggcggaggttgcagtgagccgagatccactgcactccagcctggtgacagagcaagactgtctcaaaaaaaaaaaaaccaacaaattggtagcttggagttatggtacggaaggctttaaattccaggccaaggagtctttcctaaattccacagcaaatgaggaaccattgctggrttttgattggagatgtggtgtgatcagagacatgcattaggaggttgtctgacagtrcactagatggaaggggcacaatgactaggagaattgcttataccataaggagtgaaccaagatagtagctttgggaatggaaaggtgggcacttaagagagactgtcactcaagagagactgtctgaggtttagttctctagaagcgggccctaaggtgaggctacacgggcaactaattatcagagcattgctcccagaagtcagtaaggttgtggagcaagcaggacatggaaggaggagaggccaagcaagactgtgctttcagggcaagtgccagccttagcttggtcacacaaggagctctggagcacaaattacagttcagagtttgtttgttttgagaagagatttcaattattcagtgtttttagtttttaaataaaggatacagaaatataagccatggcttcttcccagagtttacaatttggatagagaacatgaaagacactgattaacagaggcaagtaatttcaggaaataaatatacacagatgtgttttgcaaaatacaggttcttatacaaatatataagtaaatactgattgcatggtggtttgtttttatctgaaagggctttgagaaaataagaaatgccattaatggataaaactagcagtctatctagccagacgtgctttccagcagcaccaatggacattgtagggagaacaggggtaactgtcagataattttttaattcacagatttatcccaagtttgaaaataccatgaagaatcctaggaatgccagtaatcagtgaatgggatatctacatatccataacatctataggctaaacccactcagaatgctttttgctgagggcttatgttttttaataagccctcctggtggttctgctgcaggttcaagtctgagaagcaccacattaaatgagatggcatttaagatgctgcatagtgtaatgattagggacacaggctttggagccggactacttggcgcatgggcaagttctatactacggaatgttaataacactctaacactcctatgtctggcttctggcttccttttttttttttttttttttttttttttgacagartcttgctctgtcacccagcctggagtgcagtggcatgatctctgttcactgcaatttccgcctcccaggttcaagcaattctcatgccttagcctcccaagtagctgggattacargcacctcccccacccgatcatgcctggctaattttttatatttttattagagacagggttttgtcatattggccaggctggtctcgaactcctgacctcaggtgatccaccctccttggcctcccaaagtgctgggattacaggtgtaagccaccatgaccagctctggcttcctcttttttttgcctttccatctcataccttcaatcatttgtgtcacaggacacatataagtacttgggaggagataaattttgacagtaaagcaaaatcagagttaaaggcaaatgtttaaccaatcatatccaattacaagctactcaatgaagagttttagatttatagagccaaatattctgcactcctgagaaatctcagcttttcattctgtaaatattttcatgttgcctgtagcggccacaaattaaataagtgtacattttttagtgttgatttattactcaaagatttgaattagcagatggaaatagaacattttgtatctatatattttttaaaaaatccatgcatgagaaaggagccaagtgtcagtttccagtgaggggaatgttctcatggaggtgctgtaaggttaagtctgtacacttcatttcttgttctttggcagattctgggagccaacattgtcttgttctggtttaggaagctcattcagtggaactgcagcrtcctcctatggtagcctgtcttctcaccaagcattgtcaatcaaatccaagattcttccatctctttgtacctcactgttcattttcctggagctttaaccttgtcagatctgcacctgctgcaccactgcaccagcttcctctggaccataccctcagcatcacgtgactcacacactcttctcccagatccctgcatgtagrtgaactcacttgctcacatggagggaaagtctggagaatacctcgtttcttttcttcttttcttttttcttttatttatttatttatttattttgagacagagtcttgctctgtcacccaggctggtgtgcagtggtacgatctcagctcactgcaacctccaccttccgggttcacgccatgtttcattaaatagagacaggattatagaaataattcaaaaaattcatgagtgaggaagttcaataattgaaatgaaatattgactggagaggctcaacagcaaatttgacctggcagaagaatcagtgaacatgaaaattggccagtcragattatccaggttgagaaaaacagtttggcagctcctcaaaactcaaacatagagttattataygacataacaatttcactcctaggtataaacccaagtgaattgaaaacatacatctacaggaaaatttgtacataaatgtttattgcaccattatttacaatagccaaaaagtggaaacaacccaaatgtccatcaatttataaactgattttttaaatgttatatatccacacaatggaatattattcaactgttaaaaaaattaagtaatgacactgccaccatatggatcaaccatatgcttaaaagcactgtgccggctgggtgtggtggctcacgactgtaatcccagcactttgggaggccaaggcgggcggatcatgaggtcaggagatcgagaccatcctggctaacacggtgaaaccccatctctactaaaaatgcaaagaattatccaggcatggtggcgggcgcctatagtcccagctacttgggaggtataagccaccatgcccagccctggcttcctcttttttttttttttttkgcctttccatctcatatcttcaatcatttgtgtcacaggacacatrtaagtacttgggaggagataaactggagtgcagtggcacgacctcggctcactgcaacctctgccttccgggtgcaagtgattctcctgcctcagcctcccaagtagttgggactaaaggcacgcaccaccataccyggctaattattggattttttagtagagatggggtttccaccacgttggctaggctggtctccaactcctgacctcaaatgatccatccacctcgggtggggatctctcccatagtgttgggattacaggcatgagccaccgtgcccggcccaaagactttgtttctactaagagtgagggggcagtgggtggaatgaatgtgatgatgacagaggctgaacataagctttctttggttttgtttgaagtcgagacaactggggttttatccttcggtaccagtcagtcattgactatagaccacccagggtgatacgtattttcaagcattgggaggaaagaatgctgagtctcagaggcagctctcaggttgaaactatggaagcacagcaggcagaatcaaagasataggcacagagaaccagtaaaggtccttaggacctgggagctcaccaacagcatccgcttcagaggtrgtgcagcttgagtgcatggcagctggtggggtatgaagatgagggtgatggaaaggaagtgagggcagcaccaatctccgtgcccttggtcttgggagaatggtcaagcaaagaaagataaggaaggtgttggggtcagttttggatagacaatgcacaaaactgtattttccatgaatccattattgagaacatcagagctcagctcaactttcaagtgatgcgaaggccctaaaactttgtaagttgtatgaactcagagcccctgtaatggtgggtctccacttcccacctcagtgcattaatttcttttcattttccagaaatgtctacctaatttttacacatgagggtgatcacagtgaaacatttttaaatgctttcagttactctgaggaaccataattggatggyaatgttttattgttactaatgaggaaagtggaactagatattgatcacattagtatattgttcaagttaaacaagaatgaactagaaactgttatgcattttatctggcctccagggttagattaaatgaaaaatattacttctgtctgttaaaatatatgcaagagcaacctgtagtgacaaactaaattgtgatagatgagggaaaaacaggcacttgaggaaaacaacaaatattttctaatctaatctaactacttgaatcttaactcttgggcgatgttctaatttcagtttaacttagcacaattcctgtttgctcattatagtcaggaagctattcgagatcttgtgggagatggagaatttgaaagccttgactccatggactgttcttaaaagtttttttttcctgaaataaaagtagacatttaaatattcacagtgtcattaagctatgagatcttgggcaaatcatgtcattgctttattcaaaatgcactgatttccacctaccatgtgcaaagcactgtgcagataatgtgatgtttaagcccctctttaaaatgaggaagtaatagcatcttccgtgcaggggtgctgtgaagatgaaatgactgctcctccaagtgtggtccttggaccagcagcttccacaaaatctaggcacttgctagaaatgcagrtccctagcatcatcccagacctgctgaattaacacccataaggatggagtcttggaatatgtttaataagccttcctggtgattctgatgctggttcagttctgagaagcagcaaattaaatgaaatagcatttaagatgaagcatagtgtaatgatggggaacataggcactggagccaggctacgtccctcatgggcaagttctataaccttgggaccttccctgaacctcaaagtctctgtttccttatctgtagtatggcagatagtagtaatacaggaggtatgtgagcattaagaacagggtttggtgccttgtacctttggtgccatgctcaagaaactttacctgtcatcatggttaaagtgcttaccttggtaaaaattggcaattttctggtggatggggttgattaatacaggatgttaagagcttaggttcaaacgcagactctagtcaatgttggctgtaaggcctgaggcaaaatacctaagtgctcagcctctgcatctctaaaatggactgatactagcaactatcttctggaactcttgtaagaatgtcaaggtgcctrggacacaagaaaaaatgtaatcaccggtactattagccattacatttatagtggaggaaaaataattttccctctacccttatgagttcttagctgtggacccctaaaacaaaagacacattaacaacaacaagaacaacaaaacagtttttgaatgttcatttcatatatacatggaacatacccagggattgagtaactctcatgagatggcttagaactccaacctatatgacatcttcgaagaagaataatacatttttaaagaagtgacaagacaaaagaaagggaccttgagtctctaacagtggcagattgtgagaaggcaagtatatgggaaatgactggtaggtaaagaccaactagtaaagtttgttctgtagactcctctggtgccacctctaggttgataagcatctacagatgctttgtctttcctggtagaaaggggaggaaggacacttttgtaaatttatgccctgcttttaagcaaataaggggagtcaagagagctttccttgtatcttctttttcttaattgcctttggctcaaaataatcctcatgccaaagtggcatattctgggctacacagtaatgatataaagttatgattgctaaatacagcctgtgtaatggtgctttaggcaggcccaaaggcytggtgtatctcttagggggagaggcaacagggcactaggggagtatccaagtcatttggtttgagccccctcactcagaaacctgagaatcacctggtctgtctgtggttccccacttgagcttttgctcaatgactacaacagcaaaaaagttactttgagaaaagcacaattctccattaaatatctacaggcaggatggtagaaatgacataccatggccctgcaacaccccctctcaccacctcctttctgtctccttcctcccttttcgcttcccttcccttgccttccttcccttcccttcccttgccttccttcccttgccttgccttgccttgcctagccttgtcttgccttgccttcccttcccttcccttccttcccttcccttcccttcccttcccttcccttcccttcccttccctacccttccttcttccctactttcctccctcccctccctcccttcctcctttcttttcttcttgtcttttaaaataagaatatatattaagggcccacgacgtatcaggcattgtgccaaacatgtgggtcattggcgagcaagaccagaaagagtttctcaccttatgttgctcactgaatatttgggaacatagacattcgtttatccatccatccatccatccatccatccatccatccatccatccatcctttcatttccttgaaaagtatttattgaatgtctatatattctaggtactgtttttggaatatataaggctgacacacaaatgagtataaaattttggatggaacatgtacaataaaaagagatcaaagagatcagtgatattargagacttcataatagggttataatcaaaagaacactttggaataattgtttgttttctttcttgtcttgttttccccttaactctctagtaaaggataacacacatacagaggaatatatwaaaaaaaamaactggaattcaaagaattttcacaaggaaacatacccatgttaccaacactcagatcagccaacagaacattaccatcctcacagaggccctcctcatagccccctccaagtcaccaccctctaaaagtagcaaacaccctgatttctaataccatagactagttttgcttattttcaaacctcataaaaatgaactcatgcagtctaaactcttgcatctgtttttccacctcaatgttatatttgtgagattgattcatgatggtttgctatagctgtaggttattcatactcattgctgggtagcattctgttgtatgaatataccacaatttattttttccattctacttctgttgggaatttgagtagtttccaatttggggctattatgaataatgctgctataaatactctattataggatgggatgtggtggctcatgcctataatcccagtgcttttggaggctgagatgaaaggactgctygaggccaggagttcaaaagaagcctgtccaataaagtgagacctcatctttacaaaagaaaaattaaaaattagccaggcatgatggaggatgcctgtagttctagctacttgaaaagcagaggagagaagatctcttgagcccaggaattctaggctgcagtgagccatgattgtgccactgcattccagcctgtgtggcacagtaagactctaaaaaaaattatattatacaccttttggtaaagaaatatatacatttctattaaatatatacctaggaataagagtgctgagtcatggtgggttacaaatgttgaactgtcatggttagtgctagctttccaaagtggttgtacccatgtccacacccaccattagtgtgtggaagtttccttcagcaatggttcctaagcagaggcatttctgtgttcatccatggccttctcagcactaggagctaacctcctagtgttagctcggataaccttgcatctgatcttcctgggcatgaagagttttggtaggagaactcagaagacgacagtctttctccaactagaattacttggaatttaaaggcagagtgagaaaagtgttatggtcaaagcagactttccaaagcaataataacatttcacattaacaaatatagtggggtgacaatctcttttaaaaatttctgttggaatgtctaaccatgtcttgaatgacagaaataaagcttcttctacagtgctctctggtagcacctgtatttctatagagaagatggatgggctgttttgaatgttgttcagttgttatttaaaatactgcaggagagttcagcaattttccagcaacctgaaaaataaaagtcatgctttgttggctgcttggcacactataccttaaatgatcttgtgaataaacataaaagtaagtaaattctaaaagtaatctgcaaatgacccgcaaaaatataaccttagcctttgtcttgcagactctcgtcatcaagcaaagcgaaaaaatttctaattcaacaaaacccagtcttttggtcccaggatcctcgaatataagggaaagaaatgaatcttaacactaaggtcaggggccagatgtggtggctcattcctgtaatcccagcactttgggaggctgaggtgggaggatcacttgaacccaggagttcgagtctgyagtgagctgtgatttcaccattgcaccactgcactccagtctgggcaacatagtgagacctcatcgcttaaaaaaattaaaatttaaaaaarttaaagaaataggaccaaagtcagggaaaattcaggatgaataaccaagaaagaagaggytgcatgtccatgtcacaggagatctgtgcaaccgcagtttctatgaaatagaaagcatagaaaagaaatcaacyagcragaaaaaaagaaatgagaaattgaggaatcaagcacagttaggcatgtcagttggtatatcagtcactatgggctaggttactctgggtaacaaatagactccatatctcagtggcttacatgaatgtttctttcttgttaatgctttgtgccttgtgcctgcttgctgtagctctgtcctacatcttctgtactccaggtgcaggccaacagagcagcttcaatctgtgtatyagttatttcttgccacattaatcctgtaattccaaaccaccatgaaacttcagcagcactcaggaataaacatttatttttttctcgtgagtctacatggcagctggaaagttctgctgatctgggcctggcttggctgagctcagcttggctcactcacctatttggggatggactggcatargctggtctargatgacctcagctaagacaatgcatccctggtccactggtctctcctctttcagctaacccgtgctgaattacacgatggtatcagaattccaaaacagtgaatggaagagtgtaaaccctcctgcaaattagttaacaaaaaggcacattactgcttctaccacattctattgaccaaatcatgtctcaggctagcccagcttctagggacagcgatctccatatctccaaatttggtggragttgctatagaatcatattacaaagggagaagkgagaagtgacagtcatttttgcatcagtgttctaaaacctggagcatygctggtcatgatggcaaaggaaacataagcacatcacttctctcacatttctttggtagagcaagtcatgtggccaagtcaggtgtcaacccagtaggcaaacagaatcctctctcacagattggcaatgaatatctgtaaaataatacaatatttcacagaagttagagagagggaaaaaatgtaggtttctttcagtatgttggtgtctgggatagacattatcctggcatgagaatgattcctggatgttagacaagacatgagaaagttgtaatgcactttcatttttccaaaattctgtcccttgaaagtccctttagcatataggcacccctcactggcataacctytaggtcaattaatacaacctattatcaacctggcccttggaagcaacaggcatatacctgttcctcatatggcaaatggtaaaatgaactcaaaaagaacacttaaaataggtactttttccaaactcggtttcccatccagtcaaggtcagccggtaccaatccaagctcacaaactcgagtgcataagaattcagctgtctttattttctgcaactctagttaatttctattataagaccctatgccacaataaagtataatttaatttcagttaattcagggtctccacatgtttgcccagggctggatgtttagctctgaggtattcactgtgtcatggtttgcatggcattggatccggggtatgcattcctctgtcacattgatctttgtgagccatccttcacatggctctctgtccttggtcctacagattactggtgcataatcctaaagttctgttgcaagatcccagatgagggtctttctcgcattgtcatgtcatcctggtctgcaggagatattcaacatccctatgccacatggggttgaaggcagggacttggtcaagttgatgaaggccaactggctagacataatctgcttctatttctaacccacagtcttcctgactgcttggaatttcaccaaaggaggcttaacccttacttcattcttccaaacctatcctggttttcaatcagtcttgtcccaaggaggtgtgcctaaggtcttattgttttcctttcttagggagccacccccatgcccgttcttctccccaagtcctttattttgtttgaggggagggtaagccagcaaactttacttatctaaatcttaccttctcaaaaatctattttattatctgtgtatatgagcttgctttcttcccagagggcctaacctttcacaactcaaaagcctggaaaacagttgttattcctctccttttagtgtatcttccatttttttgaggcaatgaacataaacatgacattaccagaatgggggtgagaggagaagacaggattcaacaggaagtagaaggaatgaaaaggacaaaagtgaaaatgattgttgctgtattgggaaatgtttaaagacctgctctcaaacaaacaaacaaacaaaaaagataaaagccttgatttgtagtgtttactgatttctgtcatgtaaacactcccaccatggctggtttcacattacctatgcgacatcaccgatgtgcaacacagagttgagaaaagataggtgggagggcacgttatgtagtattttcaccatacagatgcaaaagacataactaataccaagaccatacagaataattaatgtagtgaaataattacaaaggataaattatgtttaactttgttttaatataatctatttaatggcaagtttaggtaatttaattttaataatggttttgtttaactggctcacaaaacatctgaaaatttcataacaggctctcagcacctcaaaattgttaatgtattaaatacaattgttaatattttgtgacgattttttgacacaaaggaaaataggcttttcttgctgaggatgtgaaatggrttatttagcaattatgagtgctctggatgtctctgagccctacttcccactctttcagactcacctatgatacagctgtttttatcaacctcatgccacttgttttcatcttttgatgtatgcccaggactgtttgggcctaacatggaagcatggrggctgtctgcacccactggggcaacccttacctaattgggaaagaaggtgatggatcattatttctctccactgatcttcatttacaacaagctcatttacaactccataatggattgttggattgaatttcctcccatctctgttacattctgtgttgccctcactcctgatctttgagagaacttcccgataaactacttgtaccgaagccctgtctcaggctctgctttcaagagcactcccaattaagacactgactccatctggtctcgcaccactatcctagaaggcttgtgttatccaargatacctgcagtgatttggagcatgcatgtgtaattttttactcagaaagagtatgatatatagacaagacatttagaaactgtagacacgaaacagaccaaaagcattgatttgggcgctctctgttattggataagtctgtctctccacaggccttgagactacaaataatctaggaatagatgttcatatgaggtcattcatgatgatctgattttacaaatgtatattagaaagatgtgacagattgtagtttcaaattgactataacaagatctctcatctcacatgttcttcttaaaatgtaagtttgactaycctgccatcaaaatgtggtggtcctagctcgtttggacttctayaacaaaatgtcataaactgggtagcttataaacaacagaaatttacttttcacagttctgaagkctgagaagtccaagatcaaggcatcaacaaattcaatgtctggggagagtctatttcctgatacctagacagtggcttctctctgtcttttcacatggtagaaggggcaaggcagctctctggggcctcttttttaagggcattgttcccaagcccttatgatctaatcacccccacaaagccccagttcctaacaccatcacattggtagttaggtttcaacctatgaatttggaggggacacaaacattctgaccatcgcccatggcaagtggtgtctatattttgtccccttaaactgggcaggcttctgacwgtgttagaagaaactctgtggatttctgaagctgttttataaaaggccatgtagacgtgattctcaggacagcttctgagattcctaagccaccatttgaacaattcagctgccttgaggccaccatgttgtgaggaagcccagtttagtccatgtggaaagagaacatggaaaggtcctgacactacttagagagggggagagagagagagagacagagacagagacagagaaagcgagataagacttatctgttattgtgagaataaagggcaggcttgaagttcagctgggaggcaggtaattactgtatctttttatttttttttttagagcttggagataataatggctgctcttgatgattggaactactaagtagtaaattagcatgtaatactgaaggcattttcagttatgcctgtatttttataaagtagaggtactggttttttactttgcaattttyatgtaattacaaacttacaggaaacttgcaagactaatacaaaggcatttcacataccattcatccagattcaccaattgttaaaactttgccacatttgttgtattactgtctctccctttacacacacacacacacacacacacacacacacacgttttttccgaaccactgcgaacacrttgcagaaattatgcccatttacctgtaattcttcagtgtgtgtttcccaggatcaaggctattcatttccataaccacagtacattatcaaattcaaggggtttaatattgatataatactaatattctatcaacagatattatttaaattactccaatcaatcacactctttttaaacatttcaacttttagtttagattcaggagtgcaagtttgttacataggtatattgtgtgacactgaggtttggggtagaattgatcccatcacccaaggagtgagcataatactgtttgcatagtttttcagccctttcctccctctctccctccctccccgcttttggaatccccagtgtttattgttcccatcttgtgtccctgtgtacccaatgtttagctcccattgtaagtgagaacatgtggtgttgggtttttccgtttctgtgttaattcgcttaggataatggcctccagctgcatccaagttgctgcaaaggacgtgattttgttcatttttataaaaatgccctttacactaactttttttttcctgtccaggatccaatyctggatcacacattgccttgttttcatgtcccatttctctaaaaaagttactcttttgtttagctttctagaaaagtccatcactgtgtttgtcattactatcaaagatatatagaagctgatatggccttctggtgcctttgcaagataactttggaayctgcttttcaatattgtctatatctggcttaacaaagttagaagatatagaagcattcactcagccaggagagatgtaaatgtagctgtggcactgttcgcatctatccaagcaaatgcagtttgtttactgaattgaaaaccacctgctacttgacatttaagatatttaaagaaggaatcagaagatttgcatttcttatgaataagtaattaattattattactgcrcctggaaatcgaaaacatttgtgttatagggctttgaagagggtagtgtaattggcttggggttctgactggtttgaagggaatacgtagtagatcctcattctttcaccaaccagctgactcttcaaggcccctagctgttttccttctgactgagagtggtagtaagccatttatttcttcttaactaagtggctcaccccattttggatatgtctatgtctataataacatagcagacataacatgttgtatactgggatggattctagacaaataagataagaaaagtttgggcatatttggagaagttgaccatatgccctagagcaggggattgttggagacatggtccccactggtggactggtgaagcctagaagcccttctcaaaatgatgtttttaaatacacacctgcaccctggttcagttagggtttagattagtcagaagagcagaatcatgaggcaatctggctctctctctctctcctttctctctctctctctccgtatatatatacacacacacgaaaaactaacgatatataacatatataaatttataacaaatatatgtgtggatacacatcttttaacataaaataatatataacaaatgtatatacgtacacatatatatgcttcatgtgcatatacacagttgatcatcattacttacagagcccacattttttaatttgactggtaatatttatttgtaatcccaaatcagtacttatagaatttttttagtcttttgtgaacatgcacagaaaggcaaaaaattagcgtagctcggccgggcgcggtggttcatgcctgtaatcccagcactttgggaggccgagggggcggatcacgaggtcaggagatcgagaccatcctggctaacacggtgaaacctcgtctctactaaaaatacaaaaaaaatagccgggtgtggtggcgggcgcctgtagtcccagctactctggaggctgagtcgagagaatggcgtgaacccggcaggtggagcttgcagtgagccgagatcgcgccacttcactccagcctgggcgacagagccagactccatctaaaaaaaattagcatagctcaatgcacacatttccagtggaggatgaacaaagcgctgctctgccttcttctttcagctttcatactgtaaacaaggaccttttttgtggtgtatttattactatctttttcacatttttgtgcttttttgttggtacttttgctgtttaaaatggatcccaggcatactgctgaagtgtttytaagtgcaagaaaactgtgacgtgccttatggagaacatatgtgtgttagataagcttcgcttaggcytgagttatagcgctgtagactgtgagttcaatgttaatgaagcaacaatgtatgttaaataaggtgtctttcaacagaaaaacacacaaagcaaagttatgtattggtaggttggtgaaaatgttgtgaccagagactctcagaaacctaatcgtgtattttccctaggagcaatggttcactatttgttgattcggtctttgcagtgactttatagaacaaaactactgtgaataatgagaatcagttgtatgcatatgttrtataataaagggtgaaatttcaacttttctttcccctttcaccctttataatatagcatatacattatattatataataggctaaataacaaattataaattatgttatttataatatattataataatatattacatattatattatagcataacattatgttatataatttaataatgtatattattatataaacattattatatattatataatgattatatataacacactgtatatgtttatataataaagagggaaagggaaaagaaaagttgaagtaactgaaacattaataactctttcaagaaaccgcaaataaagcccagtagtctttgaggtctgtgtgagagagttacagctttcttacttactgacaagaagaaactgtcactgattcggctgtttctcttgtggtatattttgtcaaaaaatttacaccagaataagttaaacaagaacgaaagattttatttaagcctattgcaataggggagagaggccagcacccaactcagctgagaaaagggttgagagtttttaagagttgggataagggattgtaggccacctgtgtttgctaagtgttttccaaatgaaaagtaaattttcttgtatcttcatgacaggagataattttacagggttggaacaaggctgaatttaggctcctatcctcccacagagactgggagataagggcatgatcttccttgatgcttctatttctgaagaatagctcccaggtccttgaggaagacattccctgggtctttatactgcaaagaggctttaaaaaagatttatatacatttcaaaggggtaaagaaacaatttgcaattacaagttttctaaagtgagtgctctaagaaaagggaagtcagggatctatggtcagaaagaaacatgtctaaagtttagtcaagctgaggggaacattaagtctgccttcatctatctctctacatttgtgagtatatcctttaaatatgtatgagcatatatacatatattagttaaataaatcagactttgtaaaattgtggagatgaagccgtgggtctccaggggactaaaaaatcattactaagaattgcaagtacttgaataccacattatttgtgaaatgaataaataataatgcttgtatgttaggtttccaaaatatacttttgtgatcaataagacacaaattgttttgttgaatacattgaataatatctttttgtcatctttcagtttattaatcaatgaatattaaggtataacattatcatgtacaagacactcaattgatttctctttaaaaagaggtccttatgcacaaagaattattggcactattaagcagttaatgaactatccccataaaatgagtaatggtcaatattctatttccaaattccttcatcaaaaagcagcattctccttgagttggaacattgtaattctagaggaaaaaattaaaagaatttttttgacatatggtttggtgataaacttagtaaagaaatatcatgctaactcaaaaaaagcttagatttagattatgaaatgtgtttaaatgttaagaacacttacagtataataaaaggctggggaataaaatcttaagctcagtttcacatattgtgtactgtcctaacataacctccagaagaaagacttcaaatccaatgtcacaaagtcaaatagtatcaagaatgtttgcaaaaccttgtcaaaaataagataaacctgtacatacagtttaaaagtagaagagctattttaaaccaagctctgtgtcacgaagctcaagacttcratttcctttcatgtcactaaatagcatagtccaataataaagggtgtagtgcaggaaaacggggaagttaaaaagttatcaaaacattaataactctttcaagaaacctcaaaatgcagcagttttgtgtaaagctcataggctttcaggccatgtggacaggttacagttttcttctttgaacaccagaaaaggcatctctgaattcaactatttttattgtggtggtggttcttttgttcccacagctctgcataaggaaagaaaaatgttcttaagtagtgtaaataagctataagatctaaaggattaagataaagtttttgaaactgtactttgagacagagccctgaggcctaactctgaagttctctaaaaatacactagttttcccttattaaaaatttcctacacataaatcaccctattttmcacacacacacacacacacacacacacacacacacacacttttcagtggtagccacattaacataaaacttttcttcagtctttagttgcttataaaaatgcaaacccctttggaaatgttgtttgaacttaataaaaaccagaatatcagtcaaacgaatcacaaagtgcatgatgaaacttatatakgtgtgtgtgtgtgtgtgtgtgtgtgtgtgtgtgtgtagatacatacagttgtttttttttaagagacaaggtttctcttgttgcccaggctggagtgcagtgacacaatcattgctcaatgcagcctcaaaatyctaagctcaggctatcctcccagctcagcctcccaaatagctgagactactggcaggcagcaccaacacccagctaaatttttcacatttttttttttgtagagtcagggtcttgctaagttgcccaggcagccttcaaactcctgggctcaagtgattctcccaccttggcctcccaaagtgctgggattacargcctgagacacaatgcctggtctcaaatatttttaactcgactgaaaacagaggaacaaagtatatattctccaaatctactggacagaaacaaaattgaatcattgacatctttttcaatccaaaccaataattcactcggaatgtttatttctgcatttaatcaaacatgtgtcctgaaagcatcttgggttttatgtgactattttcccaggttccttcattcttatagggagtctcaatttttcttagagctccattagagagaagcaggtgttgaacttggagaaggcgttggatttatttatttttttctcacaaagtaataaatatataatagtcataatagtaacaatagtaacaactactgccatgttttcttaattggaaaacattttgaatcacacagatccatctcattgactatcgcttttattgaaatttaggaggcagctaatattatgtacaataaatgcatccaaatgaaatcaatggtcctaaaaggccaactcatttttaccactggtgcaattaaaatacagcagtaaaaagcagaactgacattgattttccttytcttttttggaagtagattctttcccttgataagcaatgagaaaaaaaatgtattctacatgactgtttttctttgtgttatacaagattattctttgtgttgcacaagatgtactcctggccatctacttgataatgaagcaagtttagtattaattaatccattactatggtattttattttgcttgctggcattcaacttaccctaaaataccaaagggaaaaagaaaaggaaaatgcaaagacaggaagctagatttgtcaactgcatagaatatgtcactcaaaggtagatttaaaacattgattttccaacatggtggggaagggagtattcaaaattatattctgggcaatagatgcaatatattaaggcactacaggtttttaaagaagctgaaagtaacaaaaggraagtactaattattttatatatcacaccaaatggataatctaaaaattaaaatcaaaatgtagagttggcattggggtactttttttcaacagttatatacaaatgtgtttatttataacatgagtgctgtggggatagggagaggaagtgacttaccaaagatgttttgatttcatggttaacattcaactagaagcttatctgcctgatgtacaggctrtcgcatataggtgtataccttgagtacaacttcctgttattctttattcctgtaaaacaaacttgctccaaaggaaggaatcttttctgccagaaggcaacaaccttcagaaaaataaagatcttttgagatctttcatctcaatgaattatgtttagacccagtgaaagctaaggaggcctaatgaagggcatttacaaccccaggtcactgagtcagacaagggaccccaccattagcccccatttccctttgagagatacactgaacattttttttcctgtcaatttaaggaacttcctttagtagtcatttctcaaaaagaaattatgtctgcatgtagaatacacacattacccagattagcttgaaattggatcttgtttagacaatcaaaacatcttcagcgattcacttcccatcgctgaactgaaaaagtgaaggtacaagtaaccatacttcacacataattatgtcaaaaagtagagtttcactgatttgagagttatttctggaatttagctttacagaatatccccctcctccatcccacattggcctgatcctcttcctccttttctcagccctagggaggtatacttaggtagaagttgacgatgcaaattacttttacatcattgagtgtaaatgaatcaatacctaatcctggagtaggtgacttggttcctttttttaagttatgggtttaagctgaggaggaagattcactgttttatgcaaaaatgtaatagttacattgaaaagaactagaattctcattaaaaactatattggttcatctatataaaacacactaatactcaaaatgtacctatgtggtttgaagtaaggacagtggtgacccttatagggatgggggacaatggcagaaaaggataagtgtctgtttccwgatccaggtgctgcttacgaggggacaatttctgaagatccagcaggctctaccttcctaatgtgccctctgggaaacttcctttctattcaataacaagagtagaaaatttacaatcatgtccaagcaatgctgttcactttyagatttractgtgtgaactggctgaagatccttagtattttttcaacccttttattttgaaataattatagcctcacaagaggttacaaagatgrcacagagaggttgcatgcatgtaggcttcactcagtttttctgagtggttacattttacatcattacatctatctatctatctathtatctatctatctatctatctatcatctatctatctatctatccatctatctatctatcatctatctgatgtgagggcaatctggctgcggcatctgtcaccccattgatcaccagggttgaytcggctgatctgactggttagacgggtgtccccttcctccctcactgctccatatgcatccctcccaaagctgcatgctctgtcaaagaggatgaccatscccgacagaggaggaccagtcttcagtcaagggcatacgagtacctccgctcccatgctagaacctccaaacaagctatctatcatctatctatctatctatctatctatctatctatctatctatctatcatctatctatctatctgtctatctacgtatccatctatctatctcaaaaaatatatagatatcaaaaatatgtatgaatagcaaaaccaagatatggacactgctacaatgtgcacgtatagttctatatcattttaatcacatgggtagattttcataacaaccacatgatgtasatacagaactattccactaccaaaaagaactctcttatgctgtgtgtttgtagtcatactcaactccctcctctacaccatttctaatgcctggtaaccactaatctgttttctatctctacagtcttgcctttctgataatattatacgaatggaataatataatatgtagccttttcagattggctttttaaaaacttagcataatgcccttgagaaccagccaggttgttgcttggatcaatagttgacttttttttgttactaargaatatttcacagtatgatattccacagcttgtttaaccatttacttctcgagggacattttgattgcttctgatttttggatattacaaataaaactgatatgaacaatcacatctargtttttgtacagacataagttttcatttttatgtgataaatgcccaggaatgcaattgctgggttgtatagtgagtatatacttagttgcctttttttggtaaagaaattgccaagcaatttttctgagttgctgtaccatcttacattcccaccagcgatgtatgagaggcccagtttttctacatcctcaccagcattttgtactatcattaccttaaagtttcagttgttccaatargtgtgtagtgatacctcattatggtcttcatttgagttttcctaatggttaatgatgttgaacattttatatgcgtatttgccattcgtatattttcttcagtgaaatatctcttcatactttgccctcattttgtttcttttatttttgttatattgcctaattaattcctttaagattttttagcatctttttaaataaaaatatttctccctgttaacctatctacaggttgctgtttctgctagtgatgagcagcgctttccacttgtgtctggagaaccagagagtccctgcttcccagagagcccccgctttcttccttctctttgttctgactggaaagaccttttctagactcttggcctcccttatgggagaaacctcatggtttctgatgggaagcgaaagcatctattaagattcacatcaaatgacagctcttccaggaagcctggacttttttacaccaaatatacataatcactagtcttttaaactggcatagtacttttacaaatagttcccagcggtgccctggtagatgctgtttgtgtcctctccatatgacactcagcatttctttgcacactggcctgatttctgtgctagcagctactcctccctgacccttggtctctttctctgccttctttctctgccttccagaggttgctctgcctgggcagaaatgctgggaggagccctcaacctatggtaaataaacacttcagcttctttactccttgtgtaggataactgtgctcagagtttccaagtgggagtaagtcctggttgcccatggtgggaactggcttgataacacacatttcattggctgatttcctttccctttttcatttttctattgtcctactgaaattttctgaggtcccctcctgaataaatttaaataattgtttcaagtttcggtttttgagaacccaaaattaggtagcaagtattcccttctaccaagatgaatagtaacccacaaacccctggtcgttcctacacaacagaaagctctttgcagagagrgagagagagagagagagagagagagagagagagagagagagagaaagcaaaccaacagagtatcctagctgaaagaagagcaagtgcaaaggtcatgaaaccaacatattcttggtctatttaaggaaccgcaagagactaacagggccagagaaaagtgagtaacagaaggactagagctggaaatgagctcatataggaaagttccatctttccccttcttcaaatagggagtgagggtagagatgaaaacaaatgggctgggaaaaatttttctggcctaagggctgtggaaatgtaatatttcttatgaatgtcaccagtgtctaaatggatcttaaatagtctatcaatgcacacaggccatttttcctggtatttaaatgttattaatatacatagtcaaactaattagaaaccttaggatcttcctattaaatagaaaattagatatatgagcaaagacagcacatattgttggattagatagtatgaaagggttgaaatgacagtctgtgaattgggcagaggtatttccaggtttcagactgrgatgttcccattattgcattttggttagatcttctttggggtacatcctcatgttattaatctcaaagatgaatcagcctaaatcttgacataaatcctccccaaaccaaaggataagagcattaaccccaaccagctatatctgtgactagaggccgtgaacctttttggcagagctgaaaaatagatttcattcttgacctgagacattgctgtctatctcagaattgatcaaagtcttaagactcaataactttgaggaggagaacattccctggaggccaagttgaaaggtcttcaaatccacttcacttccgactgaaggtagacttccacgatttaagttatgtcatgaacagaggggaaaaagataaatgtagtaagcccatyttggcattttcctcatatgcattttcaggaaaaaatttaaggagggatgattcatttgcattaggctggctttctcttagttaaatacctttgttttatgttcctgttattccatcttcataataaattgccctaaaatgtagtggcttaaaacaatagaattactttgcttacaaattagcagcagagcttgatggggaatagctcctctctccttacgtgtcttccactggaaagaaggctgcaagatgaaaaacctaaaaccctactccttggcatgtctgcctgttgatggtggaaagactccaatagtgctggtgaggctggggctcctaaggcatggctctctgtttctataggagatctccatgtggttgccccacattgcagcttcattcagtagatgaacttcttacctgttggctcagggttctcaaagtgtatgccccaaaggatagtgtcaggaaaagccatattgccttctaatgcctgaggatgagacatagactctaactctcaatggaagagtgtcgatatcatcttgtaggataagcacatgggatatgatatacaatggtgwggtcatctttagaaaatactgyctgccatattttgcttcttataacatatgctgaactgcagaactatgaattctctctcattatttactagacaaaataactcacagcttttaaggcctgacctcgattccttgaacagaacaactggaaatgataaaaagattaagaaaacactcatattacatatcacactcaacatttttgcacatgggaattgcattagaatcagrcagaactgcattggaatctcagctctgttattttctatgcaggtatcttcatctgcaaataagaattcctatctcagggtggttatggtgattaaatgagaaaattcacataaactctgagcagagtacctaccatatagctactggttttagtagggagtggtagtgatggagatagaaattaatagtagtaattacagtgatgtacttaaaggtgtctattttaagtcatgtcaatagattttcttctgctgctcatctaaatttcacaataagtaggctccccagcctcacatgcattagtgtttagaaatttatgtaaatctgattaatgcactttgatctgaattaaccagagtcaaatcaaattctctctcaaaataatacctcagctctcgttttggttcagctattcacagtgaattgctgtggaacttgggactggcaagctttgtgcatttgcacaactacaacattgcttagggttggtctgttctactatagaatacctgttggttaggaaggtcggcaaaagtctctttcattaatagtaagtatgtggcatatgcccttcagcagaagactgtcgcccttcaaagaagccttgtgagcctaccaatgccctctgtgctctcttcttccacttaatatcttgagggtgcttgttgtctgtactcttcatgtagcttgtaacctcaaattctcctgtggcctctcttgcattgcttttgcaacaggtcacctgctcttactcactaactctgcatttgatgactaacttgtagaatctttgagggcaagtgataagtattctgcttcatggattctttcatccgcatatatatattcaacacccactacttgccagacactgttcttagtccagagaattcacagtgagctacagaaactccctgtctcagactgcgctcctctagaagctgacctggagatatgggttcatcttcaggcagtttattggagaagtgatgtcagaaaacaccagtagaggtgtgggggaagtgggatggcaagaagaggaagcaaggaagaggtatgttttccagaaggttaaacactggggccaaccagagcttcaacctattagggaacccgaggaaacacctatcttagtattacacacttgatgagtgagggagctgggaggtttatattcccaccaactcccatcagggctgcttgcagggaggggccgcatgaattcctgaaccctcctgcaaatctgaactccagcaactagaaaaagcttgcaggcgaataattgtacataataaaagatgggccagtgtggattgaagtaaaacttgctgagactgtgtgtcagtttcctagggctgctrtaacaaagcgccacaaactggatggcttagaacaacagcgactgatggtcccacatctctgcaggcgcgaagtctgaaatcaaggtgtcggcagggccaggcttgctctggaactgcagaggaatcttcccttgtcctttcctagcttctgrtggtttgccggcaatctttggcatcccttatcttgtagaggcatcgttctaatcctctacatatggtgttcttcctctgtcttcactttgtcttctgtctgtgtctaaattcccctttatataaggacgccagtcatattggattagagccccaccccaatgaactcatttgaattgatgacttctgtaaagactttttccaataaagttacattctgaagttctgggggttaggacttcaaatacatatattttttatgagacacaattcaacccatatcaggggataaaagtcagtatgctgacagcatctgatgtagtctctacttcaaaggayctatactctagtacaggggtccccaattgataccagcaggggtctccccacgataccggtctgaggcctgttaggaacagggctgcaaagcagaagctgagtggcaggtgagcagcattacctcctgtgctccgcctcctgtcagatcagtggtggcattagattctctaggaactcgaaccctgttgtgaactgcgcgtatgagtgatctaggatgcacactccttatgagaatctaactaatgcctgatgatctgaggtggaacagtttcatccagaaaccatcccccctccatccatggaaacttgtgtcttccattgaggcargagtataggttctggagtgagggaacctaaggtcgtttcatgctgacttcctagaactaaattgaaaggaaaaccctaactttccacgcctaagggaaaaaaggaccagaggctactccctttgcaaaccyccgaccttttctgccaagcagatgggaaattggctgtccgcaaccaatcagactgatggccggtccagtcttcctttgcctagaagtgcaactttgtaactccaccttagcctgtgattgattacaaaaagcaaccaatcagatatttgcacaggagtgtgaacttcattaactccacttcagtccactttgtaactmctcttcrcaactcctctgattgcaggccaccacttcatttacatgaggtgagcatgaagtggccagtgggtatttggacccgagaagattctgtatccgggcctttgagccgctgctcaggctcgttcccacactgtggagtgtactttcattttcaataaatccttgctttcgttctttcgttgcttcattctttctgtgctttgttgcgcatttttccaattctttgttcaaaacgccaagaacctggacaacttgcagtcaagaccctctactggtaacaccatgaaatcagtccctggtgccaaaaagtttgggaacctctgctctagtaggggagaacaataaagaaaacaaataaatacaatgtatagtatacatgaaaatgataaatgytatggagaaaaatgaagacgggaggtaggatgcttcttggtattctccaaaagrgttcgaatagttatgcacacacagttgggggttcaataaatatttatgaatgtcacgactaagtgtctgaatatacagagtgtgctattcatatgatctttcatttgatatttaatatctatcagtggtctgcctagtagtgtactaggtctctgtggagaatctgagtctttttttatttgaatggtttatttactcactaagaagttttggcagatttatatgtggactgtggagttcagaaaagtagtgaccaattagttgtatttgtaatctctctggagaattattttraggaagaatggttaatacacatacacacacatataaaacctatataaacacatatataaaaacacatttaaatataaagtgcctcaaaaaaaaaagcaatttggtaaaacattagcctgaaaataaaataccaatacagaacaatttctagtttacttaatgaggacatggtgatacctctctacctatttcatgaagcttttatttggtacatttactttaattttttaatgcataatatctcgttaacaattctgacatgggctttctaaacactgaagttataattatataaacatttytgggccgggcatggtggctcacgcctgtaatcccagcactttgggaggccaaggcaggcggatcacgaggtcaggagatcgagaccatcctggctaacatggtgaaaccccatctytactaaaaatacaaaaaatcagccaggcatgrtggcgggcgcctgtagtcccagttactcgggagactgaggcaggagaaaggtgtgaccccaggaggcggagcttgcagtgagctgagatcgcaccactgcactccagcctgggtgacagagcaagactccgtytcaaaaaaaaaaaaaaaaaaaaatttctggctctgttttagtttcatggtggtggaaattatagccataaaaatcctctaactgtatgtattatagggagaaaaatkacattaatcctgaacaatgggtaataattgagacgtgttgtcaagcagtgcagtgacaaaaaataaccttgctgatctcctctgtatctttgaataattatcagctataaaaaaggaataggttggtgctataatctttttgtttttattgggagaaagactattttaatcttattttgacagtcccttatctaaactattaacaatttattcattctgtattattagattaagtcacaattgtgatcacttatgactggacattctctcagctctttcagatcttgctccctgggctctgtgccctgagacccatggggttccacyyaataccggtcttaaatacatagtttttttctgaaagctactaagcacagcttgaatgccagtgctttcaattaaaccttctargttttgtgctggtgttaaatargccaccactggggttggttgcttccaataaatgtagaactaaaggcaactgtagggtgtagagagagatgatcctttaaaccaatatagtggagataaaagattgaacaaactgctctttttcttgcttgacttagaatagacatgttgtaaatgatactcttaagcgaccaaaacacagtaaaaatatccagtgacaaaggaaaaaaggagagaaaataacttttagttagctgtgttagttattggcaatgcatatatcaaaacaggaaagatgtgwtttcattcttcagggttgactttatactyaacaagattacatggtgaagagtcatcagaatacaagattacatggtgaagagtcatcagaataatcaatcttcctccactttccttytaacagtctcttcgtggcctgtgctgaggactacatcagtctcctgcaattatcatctacactgaaaaacaaagaggacagaggcraagctagtggccctcaccatcccctgcaagctgattgcttcttactgcaagcacttgagcatcttcctgagagctttcttgggcaatgggaaccaggcttggcccaatcacaggcaggtgaaaagtatgaggaaatggagaaggcattgtccaaggagcagtcttcaaccttcaccccgcaagtgagacaactctgaataagatgtgttctacactctcttccaaaggtccccagttggatggagctctagctgctcatgtgataagctgcctattaatacacaaaagattgcctttcctccttgctytgtcttcctgctgctmtcctactaatgtttcctgggattgcctccaaataaaccacttgaactcacatattagtgttattgtcagttggaagattttagtgttttagatatataggagctcttccgcttttaagattgccaatttcttctttcttcagagcagtattcatacctggaccgtattatttttttctggaagtattttattattgcttaaaaataccaggaagattaccatgaaaactgtacatttataatttaaggatggaatcttcatgtagtttcttaaacctyggaggtgaaggtattacatattccagaaattcaggaaactttctgtgttatagaatagcaggatattgaaacctacattctctggttaagagaatgcctacatgatttttaaataattggtctatgggctgcccatggtggctcacatctgtaatcccagcactttgggaggccaaggcgggtggatcacttgaggccaggagttcgagaccagcctgggaaacatggtgaaatgccgtctctactaaaaatacacaaattagctgggtgtgagggtgtgtccctgtaatcccagctacttgggaggctgaggcacaagaattgctcaaacctggtatgcggaggttgcagtgagccaagattgcaccactgtactccagcctggctgacagagtgagaccctgtctcaaaaaaaaaaaaaaaaaaaaaaaaagaattggtctgtgaatagtgatagcaaacatagcatatttttcttattcaaagaaataattattgagatcctattatgtatatgttttgtaaactggtcccctattcatggtsgggccccacttaagctcaggactagatacttaccaaatcctggagaagggcctgtttgcttctaagtttccttgctttgtggaatttaaagtgattgtcatacccaagtaagagatgcttagsggrtgaggagaggattaatacagaggctaagttcttattcaaatgcagctmagttttagatctcattttatggccatcatcccatacagatttgccaagaagcattccaaaatgattcttgacgattagctatcaaatagaaaaagaaataagatacttggccgggcgcggtggytcatgcctgtaatcccaacactttgggaggctgaggtgggaggatcatgaggtcaggaggtygagactggcaccacagaagtcatttctctagtttatcccttcagaagtggcttacatggtataaggcactgcaaaaataaataaatatttgtggctagtaccataatagcatatcccctttgatgaggaagaccttgaaataagtataagtatgatgttacagggacagaaatgtagaaacaaaactttcatataggatatatactgtgtacttgtgttagttcattttgcattgctataaaggaatacctaaggttaggtaatttataaagaaaaaagatttattttggctcacagttctgtagactgtacatgaagcatagtgctggcatctgcttcttgtggggcctcaggaaacttccaatcatggcaaaaggtgatggggagcagacctgtcacatggtgagatagccagtaagagagaagccaactcgttgaaattatatatgttggctggctaaggaacaagtctagtgtagtctgtctctcctactgattacaactaaaaaatctgggcagaatgtgaatagaactgcccaagatctctgcaaagtaaccacagcaagtgggttgaagattgatgtcaaaacatgagtaatgacccaaaaggggtagagcagaggggtgggatatggcaggtgagtttcrtgttgttgttttctttgtctgtcagcattgtctcaagagggggtttaagtcctagaactgcacagcaggtgctgaaagcaaatgctttagggaagaatcccttctttttgactaaagacaagtaaaraggacctctgtatgctggagaatgtggggagaatcccccatctccttttttaaatcatttacctccagaccctgcccagagcagctcagtaactgagctgcatagatgtctggcagtgaagaaaaacctaaaaccatggcagaaggcttgtctttctagccagaggagytaaaaagaagctcctattgtccagagtgtgtacaatccatgccatttttctcattctcttttctttttccacttaaccttaaagtaaccctatttactcaaaagtacatgacgttgtgagaggctaaacatctaagaagattcaatctttctggctagagataccasgggaaaaaggtcattgattatgggaacatgtgggagaaaattcagagaygaaagagctgaagaaatagaattccaaatttcgggtatgtaatgacataactcttggactcaccctgagctaagtatgtgtggaacaacaccaaggcatagcaaagattgtgagggctgaactacaatataaactatgactcaaatttcaggctcttctccaagtgcagcgtgcatcagcctggcccaaagagcacagtaaagactttgaaaacagaattgacattgggaccaccatcaytgaaggtgaaacttcttgacagtctgaagctaatcatgttaattatcagttactaaaaaaaattaacattttttagattataacaggacctacaaacttgcaagatgaaactaaaatgttctggatacaatccaaaattatgtgacataataagaatgagaaaaatctgaaaaatttactgtcttcaaggcaaaagacagtaaatagatgccaaacataagatgacctaagccttggaatagtctgtcaaagactttaatgcaactattataaccatcttctgtgagataaagttaatgctcttgaaagatagaagctctcagcaaagacataagtaaaaaactaccaaatggaaattcgagaactaaaaaaaaaaaatgatagagcttcaacatgcatttaaaaaaaacctgatagaactgcaagaaaaaaattggcaaatccacaactatagcctatattttagtatttccactttaataactgatagactagtgtattcgcctattttcacattgctataaagaaatacctgagattgggtaatttataaagaaaataggtttaattggctcattgttatgcaggctatacaggcagcatgcgacttctgcttctggggaggcctcggggaccttttgctcaggtggaaggcaaagcgaaagcaggtatcttcatatggctggagcaggaggaaaagagtgagaagggaggtgctacagacttttttttttctgttattattatacttgaagttgtagggtacaagtacacacagacttttaaacaaccggatctcacagtaactcactcactcgctctcatgagaacagcaccaagagcatggtgctaaactattcatgagaattccacccatatgagccaatcaccttccaccaggtcccatctctaacactggggattacaattccacgtaagatttgatgggaacacagattcaaaccacatcaagtaggtagtcagaaaatcaataagtatgttgaagacttcaacaaaacactctttgcaggtgcaaagaatggaatatttaccaagataggagatattctgcattatattacaaatccttataaatttaaaagaattaaagtcctactcagtgatatggtttggccgtgtccccactgaaatctcatcttgaattgtagctcccacgattcccaggtgttgtgggagggaccctgtgggagataattgcaycatggggatgggtctttcctgtgctgttgtgatagtaataaatcccacaagatccaacgcttttgtaagggggtgtttccctgcagaagttctcttttgcctgctgccacgtaagatgtgtctttcgccttctggcatgattgtgaggcctccccagccacgtggcactgtggrtccattaaacctctttttcttcgtaaattatcccatctcaggtatgtctttatcagcagcatgaaaacagactaatacactcagtatgttcattcatcacaatggaatagattggaaatcaataacagaaatatctctagagaattgctacgtatctaaaaattaaataccacacatcaaaataacccagaagctaaagcagaaatcaaaaaagaaattagaaagtactttggactgaatgacacaacatatcaaaatttgcaggactttgctaatrtagtacttaggaagaaatttatagcactaaccacccataacagaggagaagaaaggtttcaaatcagtgtcttcagtttgcatctcaaggaactagaaaaaaggcaaattaaaaacaaagtaagcagaagacaggaaataataaagtcaatgctgaaatctaagaagtaaaaaacaggaacacagtagagacaaatattgaagcaaaaagctggacttctgtgatgatcaataaaaataataaaactctagcaagcatgattgtgaaaaaaaagagaaggcacaatctatcaatgtcaggaatgatagaaatgagaccattacackttctgtatatatttaaaagataataagggaatacgatgagtgactttatgccagtaaatttgacaatgtatgtgaaatggacaaatatatgaaatggacagatttcttgaaagacctaaaccacaaaagttaactcaaaaaaatgatagccaacgtatatgaaatggacaaatatatatgaaatggacaaatttcttgaaagacytaaactacaaaagctaactcaaaaaaaaaaaaaaaaaagatagcgcaaacagcyttttatctacttaagaaattaaatttgtagttaaaagcctccctacaatgataaatccagggccagatgtccttactggtaaatccagtcaagcatttaagtaagaaatcaaaacaattcaggtaaactcttctaaaaattgaagaagaggcaatacatcccaatccattctctgagaccactacaaccttgatatcaaaatcaaagccatcacaagaaaataaaactatagacatatattcctcaagaatatacatgtaaaaattctaaataaaattcaacaattttgataragataatacttcataactatgtagagcacattccaggaatacaacactcaaaagtaagtcaatttaattcactataaaaaaagcaagcaaacaaaatctttgtgatctttgactaagtaaagagttctccaatacaccatcagaagcacaatctgttttaaaaaagataaatacaacctcatcaaaattaaaacattagctccctgaaagaacctattagagaatgaaaagaaaagccacagactagaagaaaataatagcaaayagaatatctcataaagaacatttattacagctcaggaaaaggagtggaaaaaaagatttattcataacatatgaaaaacactcaaaaattcattaataagaaaacaagccaaaagtaaaatgtgcaaaatatttaaacaattcactaaagaagatatattgatggtaaataagcccgtaaaaagaagtgcaacatcattagccattgaagatataccaattaaaaccacagttggataccactccatacctattagaatggctataataaataraaacagcaatactaaatgctgatgaggattttgagcaactggcatagatagatcacctgcgagaatgtaagatggtacagccactttggaaagcagcttggcagtttcttacaaagttaactatatgcttactatatgacccatctattccactcctaggtattttctcaagagaaatgaaaatatgttggtgcataaacctgtacactaatagttataagcagcttcattcataatttccaaaacaacctaatgtcctttaactggtgaagggattaaagaaagactactgagaaataaaaaggaacaattgaaaactttcagtgagatggataattattttattatgctaatttaaggaagccagactcaaaagaccactactgtatgattccatgtatatgacatctcgaagggacatacaaaaggaatcgataatgcatcagtgtttgcagaggttagggtgggggagcatttgagcacaaagtaggaggaagagagaatttttgaggaagatgaaactgtttattgtcttgaccatgatggagtttacatgacttcatgcccttgtgatacacagaataatggcccttgacaatgatgttcatatttgaatccccagaaccagtaaatatgttaggtcacatgacaaagggaaattaaggttatggattaaggtttctaatcagtgtaccttcaaatagagagattatcctggattatccaggtaggccctgtatcatcacaagtatctttaaaggtgaaaaagggagatggaaaaagaggaratttgaaaaggacttagcttgcctttgcaaggcaaccacaagccaaggaatgtggtcagcctctaggagatggaaaaagtcaaggaaacaattatctcctgagcttccataaaggaagacagctctgacctcaacttgatattagcccagtgagaatcctaccagactctgacttacagagccttcaggtactatatttgttttcctgaagtcactaaactggcattttgttctggaatcaatagaaaattaatacagcgttcacttgtgaaaactcatagaactgtgtatcaaaagaaattaagtttactcatgcaaatttacaagtaaattaaaaacatttaaagttgcatatgtggctcaccttgtatttctattgaacacagtgatttagaccatctcacaagtaggaaacaactttttattgtgaatatctagaacagtggctgatgggaaacacccctcataactatcaaacacatagtagattcatatgtgaatttaaaaagtttgctggtgttgcatttctctttttaagcctatctgccaatccccctacaatcatgaggygccctcaagtttctctctgatacattttcctctttctgacttattcctttcctttgttagagccagggaagatgtggtggataaatcttttgttttaaaatgaatctgtgagsacaaggactcagttttcaaaacccaagtttagtgcatatgaacaaatgccagaatactttaggaaaatgtaaagtttggttgtcttcaaggagtayggatgaaaggtgacactaatacaaaaggtaattattctgcattgttttctgaactgagacacttcagtattactgtgaatgttatttttgatcatgtaattttcacaatgcttatattctttagaaaaggattaagaatttcatatttttgtttgaaaagatgagacagattgctcttactgagatagcaatgttcatgtgtaaaactctcatcattaatgtctgaaacacagaaaattgaaaggaattacgaagattgttaattttcayggcaaaagttgagacacatagtttaaggagattcttcactttttggaagaattttaaaccagctatgtcccttggagaggagatatagacacctgaagttrcaggcaaaattagtgtgctttttttcctggatataaggaacatgcctttcatcagcatcacaaagacaacaggtatgccttcgtagatgcaaaaaagcccacttgtgcatttggtacttgtggagaagaattctttctttttttttggcagcggggsggkgkggggcgggaggcagggggacggagtctcactctgttgcccaggctggagtgcagtggcaccatcttggctcactgcaacctccacytgccaggttcaagcaattctcctgcctcagcctcctgagtagctgagactacaggcacgcgccaccatgcccagctaattttttgtatttttagtagagatggggtttcaccatgcttgtcagkctggtctcgaactcctgacctcatgatccaccttyctcagcctgccaaagtgctgggattacaggcgtgagctaccctgcctggcccagagttatttcatatatattatttgcatatcagtattccaaagtgtgttttatagaacactggtcacatatgcatatttaagaggaaaaggattccatgatgaaattatggggaatgtattcaactacayatacttttggagattcttaatacacattactattttttacatcttatagacctcgactgaatttatttgatagataaatacttgactccarctctcactggaaatatattgttagtgcatcttgtagatgcaacgtgaatttaaagcaatatatttatttgcttgaaatctttgttgaagtctcatttgtccgtatatytagattttactacttcaaattcctgaagaaatctgttcatctgaaagcaaactgtttatataaaagaagagtgatattttagcttgtgaatgattttggctaaatatcagtctttaayatctactgaaaagggatatactttcttgattaagaagaaaccgtaactctattttaactagatcctacagttcaaaacaatcaaacccaccatattactgttttttcctgttacatttcatggaaaactgctagaaaacttccttatctaaattactcactatgtcttgggctttggcaggcactttattcactatctcatttaattctcagcacacagtgtaatattatacagatgtgggatcctgggttcagagaggttaagaatttttttattagcagctttattgaaatataatttgcataccataaaattcttccatttaaaatgtacaggttagtggtttctagtgtagtcacagaattgtgcaactatcaccaaaatctaattttgaacacttttatcaccccaaaaagaaaccccacacccattagcaataaatcccattccatcctcccttccagtcctaggcaactactaatctaccttctgtctctatrgatttgcttattctggatattttatataaatggaatcatacatatgtggtcttttgtgactggcttcttcacttagcacwgtgttttttttgttttgttttgtttttcttagacggaatctcactctgtctcccaggctggagtgcagtggtgcgatctcggctcaccgcaatctccgcctctcgggttcacgccattctcctgcctcaacctccagagcagctgggactacaggttcctgccaccacgcccggctaattctttgtatttttagtagagacggggtttcaccgtgttagccaggatggtctagatctcctgacctcgttatttgcctgcctgggcctcccaaaatgctgggattacaggcgtragccatcacacccagccggcacagtgcttttaagcatatggttgatccatatggtggcagtgtcattacttaayttttttaatagttgaataatattccattgtgtggatatataacatttaaaaaatcaattkataaattgatggacatttggattatttccactttttggctattgtaaataatggtgcaataaacatttatgtacaaattttcctgtagatrtatgttttcaattcacttgggtttatacctargagtgaaattgttatgtcrtataataactctatgtttgagttttgaggaactgccaaactgtttttctcaacctggataatctcaactggccaatcttcatgttcactgattcttctgccaggtcaaatttgctgttgagcctctccagtcaatatttcatttcaattattgaacttccccactcaagaattttttgaattctttctataatcctatctctattcaatgaaacatcatcaaaattttctttaattgtttagacataatttagctctttgactatatttatactagctaacttaaaaagtccttaactgttaagccaacatctgaattacttggggacattttctattggctgcttgtcttcttttatatgggccataccttcctctttctttgcatgtctcataatttgttgctgaaattgagacattgtagataacatagtagcaactctggtatcagacttctctcctttgcccctcaccccacttaacaaaatggttgtttccactttgcattttgttgttgttacttatttgtcatcagctttcctagaggaatcctctagattctatattccctgcagtatgcagcccatgacttccttactagcattttttgtttgtttgtttaatttaagtgttattttcagttttaagactgggttagagttcactcctgggtcagtacacttagggattagccactgatctgtcaggtttccttaactgcctggagtcatggagctctctatgcaaagacacaccttcaatcttcaggcagcataggagtcggctttagctttcacctcctgcttatgcatgacttcaaggtcaataagagctgagtgtttggagctttcacctttcccaggtctttcctgggcacgccctactcatgtgcataaccctgcacaggcacacatcccttctagagtctcagaaatatgtcagagctttttaaagttccctatggtcatctagttctctaagtcatccttttacatttttgtccagggttctgtttgcccccagtgaaattacagccttaggcagctgttatgtgacagtgttaccaggagattgctattgttttcattcatgccctcaggatagtactttttttttatctgatctgagattcaagtcaaatcaaatagaaaaaacaacctgccttagaatggggatttactggagagcagctaatttgatcaacatattgactatcctctggagctgcagcttttaatggagctccaaagaggtcagttttctctgttggctgccaggctgcaggcattttatagtcacctggccactgagctgggaatggcggtgggatgggaatagtcccaagtgaaaatgacacagactcactgttttaaagaaatgattgtatgtgatttttttttgcttgtatttttattattttatagggaagagggtttgccaaggtcctcattccactgtttcagctagaaaatctaaactcagatatctcagagtaaaatactcaggctgttaatccttgtgcttagtttacttaataaatggcttaatgaatataaagtgcttagaagagttttkggcatatataggtaaatatataattttgggcatatgcaggtaaatatacatgataagcatgtaagttatgagtgttagctattattatccttttcttttktcctccccaagagtggcttctctcttctgcttccatttggagcacagtgaatagattatttgaagctacaatgctatgaagccattgatagctgagaaaagcatttaaaatgtattttcacagatttaacacagtaagtacagccgtgcagagggctttaaactctaaggtagcatgctgcagacaaatacattctactcaaacctgggtataaaaggagggctagttctaaacagtgaatggagacaaacagcgtaataaccaaggtattaactcatacttagggtcccttccttcttcaatttaacatttctaagttaaaaaaaaaaagttattttccccttaaaaacctaattgagtagaaaaaagtatcctttccattttagtttgtaagctgtacttctggggactgtggctgttcatagtgaagctgccaatgagagcatattctgattctaagtgagatacataggaggaaattgggagcctcctgacaatgacattttacctacatcttctaattggaaaacaacccccagtctacatggaatagggaagtgtgaaccggactagtgaatcctgtggggagagactcttgtgggaggtggctatccatgtcctggagcagaatgtagaaagagaatattctaatttttcaaagaataaaaattacctaaaataacagcagctcttaataatctatgatcaattgacctaaaatctctgggggatagatctagtagtcttaaagagtaaataagagaaggctgaatacctatatttatcaatgaaatggaagacccactttaggctgaaactggcatttggacatgaagaagcaagtttgacaaaatcaggggacatgctgccagatgccaatctccatgatgggtttttattttatttttgattggaaaaaagcaaaaaaagtggctttttacaaggatgccaaggtagaaggggcaggccaagtcattctcttgactaaggtgccctgcacatgtgttcaggggcccaggtttgggaacagagcatggcctccatctgcaggcttcggaggctccagggaatgctgagtggccccagggtttgaagccttggaagctcaaggaggacgacccaaagattcctttaccaaactctagtgaggctcttttgagccctcctctcaactaggtctaaccttggcttataaatgtgagcaaacactagcacagtttctaacagctaargccacatccctaaatgaccctacccctctttaaagtgactgcctgagaaaactcaargctgccaaagaagattcactgtttgttgtggctgacacccaaggatagggcctctgacttccagtctcagtgggaagatagaatcctaactttgattaattgctagctggcagacacagctggcctaatggcatttaaactgactaaccctttgtaatttttcacttctctgactctactactcccctccaccaccatttcccccctccatattcccttactctctctttaaaacatgcattcacatctgaacaaatggaagttgagttcagtacatgctgcactcttttctctattgcaactcttcttattgattaaaatctgtctttaccactttaactagagccctgtgttgttcatctttgacattcccccagcaaagttggcactgaattgcaatggacaatgcagcagctgctctcaggtagaggccctcaactagaaggattatcaaaaaccaaagcagtgatgtgtgagtttgagacctaccccttaggaatcctggaaataattgtgtgaagcttgaggaagggacttgaggacctacatttgcccccttggtgttatgctccaatcaggaaaattgcagtgaatacgactgctttaatgtctgtaaactaatgaggattgaagacattgtaatagtctccatttattaagcaccccctacatgcccagcaatgcaatatattcttgtctatggtgcttaaagcaattctgtgaggttgttttcactctctccatttaatagattaaaaagtaaggcaaaaaaggtggagcaactttcccaagaacacacacatagtatttggcagaatcaaaattgaaactcagatcttcttcatccaaaatacaattctcatttcagttcaccctgtctcatgccatctgtagaagcgtatttcttagttagaccctcaaaatgtctgcatactaattttgagtaagtagaaaaggccaatacagcaacaacaacaaacttcaaagaaaaaggcaaatattaataaatgataaaaggcatttttactgttaacatgttaatgggtcctacacaatcacaatgagcaacctgggagaatggaaaaaaaaaatgcctgcatgcaaagggcacaaagagtgcaaaagaaacttgactcataaggctattcaygtaataatttacagtatggtagctgaagtgacaactgcttcctgttcatttacccaagttggggaaagaaagtcgctttcaaaacctgaaatgctgataattgcctatgtgaggcttcattttagagagaaaagcattgttgaagctggaattgttccagtgaaaagatggttagtgttgaaacratttgggtgaaacttgtggatttgatgaagaagaaagaggaggacgaagaggaggaggagaagcaggaggagaaggcagcggaggccaattgtgtttaaatataaattaaaccatttcctgccagatagaataagtgcagaattgctcaacaaattagccggcaggacgttcccattccaatcaagatcatgctgatacatgagaggggctaattttttggattaacaatttttatcgaaaattttctttctcaaggatctgggcccagacaccttagctaatttatgaagttgattttctaagatgttagaactttagtactgagaatgataatgaggcctactgttaatagactgagttytgtcttccgtgaattcatatgttgaagtccgaaytcccaatgggacgtatttggaaataggccctgtaaggagctaattcaggttaaatgaggtgataaaggtgatgccctaatccaataggactgaggtccgaataaataaaagaagaaatatcagcgttctctctctctcttcctctctctgcacatgcacagagataagaccatataaggacacaatgagamgatgcctctttgcaagccaggaaaatagcgcttaccaaaaaccaactgtactggcaccttgaacttggacttccagcctccggactgtgagaaaataaatgtcagtgtttaacctggtctgtggtattttgttatggcagcctgaggacattcatatgggaacatagcaataattctcagatttgggtgtggctattttgtgtgccttacggtattttgtcattgtccttcagtccgctgtgttatcagtagatattgtttcaagataagtttcaagtttcaagatattgtttctagagagtaaccacagmgattcccaagctgttgtaactactcttggatgaattttaaaatgaatgatgtgaactgtgtttaagtgcctttctcttctccatttaattttttcgcacatgatttacattgacctatctgttttctatctgtcttacttttctttcaatcatacgtagttttgttacctttaaagttgctatttaaataccacttaaaagtatttttacaaggactttgcaatatcacaggaagagttttggccttttaattccatatgaytttcacatccatccaggaaggagaggcgatctgagaaaagtgcagatgaaaggcacacagtttycaagttttctagaactcactaaagatgtggatgaaacaaaattgtccccaggtgtctaccactaggccatccactctttcaatgtagttttcgagcactgatattgaactaagttaacaggyatgcagcaaggcaacttacgcaatctccaaagtactcatttaatctatcataagacaaccccaccagaccccttattttccctaaccctgctcctctgtgaactctttaagggaagagaccctgtgccttcttaccttatctcagtgtctgcagtgtatcacacttattacacactccaaaatatatgtttagttgcattgaaggccactggaactaattaatacttattgtcctttaaaaactggattcaagaataaaactataacagaattatagctattttacca

SEQ ID NO: 9863 - DNA, 17398 bp, Homo sapiens
tacatgactacaatggtataaaaatcaggagtggataggccaggtgtggtggctcacgcctgtaatcccagcactttgggaggccgaggtgggcagatcacgaggtcaggagatcgagaycatcctggctaacacrgtgaaaccccatctctactaaaaatacaaaaacttagctgggcrtggtggcgggcacctgtagtcccagctactcrggaggctgaggcaggagaatggcgtgaacccaggaggcagcttgcagtgagcygagatagcgccactgcactccagcctgggcgagtgggtaaatggagttaaagttctgagktcttcatattatctatgaaagtggtgaaagtgtcaattaatattagactttgatatgttaagaatgcacttgtgagaacatatattcagggtaacttggatctatgctcctgggttgcagaataaaataatcttaaaaagcaacaaaaaaggaatgcatgtcgtaatctctacaaaatggaataacccaacaactcaatccaaaagtagtgagaagaaagagaaaaggaacataagctagatgggaagagtagagagcacttggtaagctgatagattgatttgtttgtttttaaattttagagacagggtctcactctgtcacccagtctggagtgtagtgactccatcatggctccctgccatctcggatctcctgggctcaagcaatcctcctatctcagcctcctgagtagctgggaccacaggcttgcatcaccaaactcaggtttgtttttttttttttttttgtagcaacagagtttcactatgttgcccaggctggtctcacagtcctgggctcaagaaatcctcccatcttgaacagggttttagaaaagttgaaagtaatatgatgggaaaatgatttagcatgccaaacaaaacaaaagaaacctgttatagctayagcaatatcagacaaagtaaagtttatggcaaaaaaacattactagagataaagaaggctgggcgcagtggctcacacctgtaatcccagcactttgggaggctgagacgggagtctcacctgaggtcaggatttcaagaccagcctggccaacatggtgaaacccctgtttctaccaaaaatacaaaaattacccgggggtggtggcacacgcctgtaatcccagctactcaggagactgaggaagaagaatcgcttggacccgggaggtggaagttgcagtgagccgagatcgtgccactgcattccagcctgggcgacagagagagactccatctcaaaaatataaaagagatgagggatattacacaatgattttttaaaagaaggttcaatttgccaggaagttgtcaaaattccgtattygtttgtacctcaattacagcctcaaatattgaatgcaaaagttgacaaaactacagggaagaaagaaacccgcaatcatctctgtattcaacagaataattagaccaaattttaaaagacaggaaaaatayggatgttctgaaccacayaattagcactcttgatctaatggacttacccggagcactgaccccacaactgcatgacacattcaagagccacaaaaattggtcatatggtgtcttttaactaacatcaaaaaatagaaatcatcaaagtatattcgcaggtcacagtgcaactaagctacaaatcaataacaaaaagataactagaaaacctccgtatgtttggaaattaagaaatatacttcagagaagatgggagggaataagatacaggacctaggtggaaggttgttttcgccaagaggaaggacctcctttgtgttaacctccgcgtgtctggaccatagctgcaccgcctcccagtgcaattttgaacaagctaaattagtcatcctgggaagtgttcaaaaattattccaaatggtggactccaggacttccttgctgactttcttactttgatcaactaactctatggcatgatcttaacagctgtagttctcaaggtttcctaaaagggaacctcttgttctctccaaattacagacccatcactgaagggcagggagtgaggttaactcctccacaaactaagtgctgctcaggtccacatctagatgtttcggtcccacaaccacccagagcctgacattattttgtaaaaacagatcctgacagagccaggagcaagaagagccatcaaccccatctctgtgagggagctggggcttggcaggcacaggcttggttagggccacaattctcctctgaatagattttgggttaactggagatgaaaaacccaagttcaaggtgagaggtcttttccccgagatggacaggtggcaacggggcctatcagaatcacaagagaagcttcattaacatgaaatattcttccctgggccgttccaggccacagactgcaggttttccatcttttagccctggaaactctctgcctacttcttttctttttcacatgaaatcttatcagggataacaggtgaaattggaagcagtaagagccctggaatcccactctcttggctacycctctctccaaccaccaccatggtgcctagccacagacatttcagcctgaacttttaaaatagtrtgtgtaaccaaatacctatctcacccatttaaaaaaaaaaaaagtcttgagaaagtctagctttgagtaaggcaacttcctgatatgcgctccaaagtaaacctgatgcaaaatgtatgagtgaggaaaygggccacatggagttgttagttgtagacctgctacaaacagcaaatactggtgacactcgtaaagtaaaaagtggccacacacacacagccctttctttggggttaatagttatcattggccagtccagcccaccctattttttwtttttttttttgagacagagtctcactctgttgcccaggctggagtgcagtggcacaatcacggttcactataacctccacctccccagttcaagtgattctcctgcctcagcctcccaagtagccgggattacaggcatgcaccaccacgcctggctaatatttctgaatttttttagtagagatgggatttcaccatgttagccaggctggtctcgaactcctgacctcaaatgagccacctgcctcagtttcccaaagtgctgggattacaggcctgagccaccgtgcctggcccagcctatactattttcgaataacaaagttcttccatctgtagataggagaatgtttgtcctacaaacagctcatctaaaacagtccgacatcacataacaatgataaaatagggagggagggccaacacattatccccctcctccacatccactgcttgccagaaaagctttccctgatacgacttgataggatggtctcagcttaggctgcagatgctgttcaatccaccactacaataaccccaggcaggccatcttacatgtttgcatacctcaggttccgattccataggagggacaggctctgctcacgtcaaacacattaaaatgcacccagcgtcccacattaaatcgtttccgtttaaacatttcaagtgaactgtataactttgcttttgaaacaatcatttattttgcccagtttttgattgttcaaatttttgtttgtttgtttggggacagggtctyactgtgtcacccaggctggagtgcagtggtgccatctcagctcactgcagcctcaacctcctgggctcaagtgatcctcccacctcagcctcctgagtagctgagactacaggtgcacactaccatacccaagtaatttttttgtgtttttttttgtttgttttgcggaggcagggtcttactatgttgtgcaggctggtcttgaactccctggctcaagtgatcttcccacctcggcctcccaaagtgttgggatgacaggcgtgtgccaatatgcctggtctgttcttcaaattttggatctgagaatattttctcaggtctcaaacatttttgagatccttggaaatcttggggattccacgtaccgctgttatccctagtacccattggataaatcagtcctgccctgtgaagcccactgcagggtttacttgtgaggaaaacatcgaggacagcatttgttctactaagcagcgtcctctctgtggggaccttgagttccttgagcacaagggctgtgtggtctttctcacccccaggtccccacaccgagagcctggcctggcatgcaactgtttaatgttcaactagtggtaatgcctaaactggacttctgtgcactgactgaaaatcacccttcctagggcacgttggccctatccccaaatccaggaacataggccaccactattttatatcttagagccaattagaaaaaagtgcctcccctgggctgttacactccactaggaaatctttccttggggcttactcacgccttctatgtctttmcacagagctggagtccacccctcacccttaccaggcccattcatgcgcaggaacacttccacacatggcaggctgtgtgcacacagacgattccctcgcctttataggtgctattcctttgacttgaaaagcccatcaactctaatctgcacwcaaacttcagcacccagcccaaatgtcactttctctgtgaatccttcccctatacctctcaggcagagttcatcccatcctcctttttattcccatcacagtggaaggtacccctatttgagtcttgccaggttgcatcaaatttctttcttccgggtttggttccctgctgcactgtgctctcaaggggaagaggcgtgtctcagtcatctcagtctccagtgcctaggatgagaccttttatatacatgtgggtcttcaataaatgttttagacggaatgcagagctctagtcaagttactcctcagctcaaaatctctacagaaccttcccctttgcttcctgactttgtttcaaattcctctaccaggcacgcagaagcttagcccacagctctcctcttgcctccccacctcacmtgccttggctcacctgcrcttctgggtgctgctggtacagccaccctctgacacttccttacctctggacytttgctcatctgtccctctacctataatgccatcttcccctctccccctgtcaaaattctagccatccttcaaggcccaggccaaatgccattttcttttytttyttttttttttttttggagatggagtctccctctgtcggccaagctggaatgcagggtcaggagcatctcagcttactgcaacctctgtcttccgrgttcargcgattttcctgcctcagcttcccaagtggctgggactacaggcatgcaccaccacacctggctaatttttgtatttttattagagatggggtttcaccattttggccaggctggtcttgaactcctgacttcaagtgatccacctgcctcagcctcccagagtgctgggaytacagggtgagcccccatgcccaacctcaaatgccattttcttcttgaagcatcccatcagcagatgtggcctccactgttgaaacccacagtgctttatcctcccaagccattcctcaaacacggttctggggttgaatgatgcgtgtttgtaattaasgcacttcgacagcaggtatctcccaacttcagcatagtgggtgctcagtgartattggcccaaatggaattgagcatccatgctacamctgcagatgggagaggcagcaaactcatgtcccaggaaccagcatgacacagatctctcttgtcctccccttgtttctcaataaggrcaatatttgcgctcaggggagaagggcayagcttgcccctcccttccttcctcagccaacggtttggcttcccttctagagaggtgagagaaggtgtgacaggccaagtttcctttgctccaccccatggtgtttcccccaaacacccagcataagttcacctctggcagagttgctttccagctcctgcaggtgggagtcgactcacctgcagcaggcactcggcacaactccgcaggaccggctcacctgcaccgggcactcagcacagcctccagcatgcagcgcctccccgctgccacccgggccaccctgatcctcagcctggcctttgcctccctccactcggcttgctcggcaggtagcgttatgagctttattcatggccaggctgggaagggggagrgaaggagggaagagaggtgggagggaaagaaggaggagggggaagattctttggccagggttggtcctgcgcaaaggaaggaggaaacagaactttctcatctgaaggattaggcagggggtgggaggtggggctggggcagggggggtcttaggttggcctgagacggagatcagatactcaattcctcagctaaggcaggagcagccacctctcttggcctttgccacaaagaaaggaaaaagttatttgctggagtctcacccatcaggggaccaaaatgatatctcttggtccgctgtgtcctgaaggctccttctcagccccactgggctgtcgtgctttgcaatcctccctgtgcacatttgtgtctgaccttccctttcctaagtcctccatccctccctgccccttgtactttctctgcgactttcacaaaacctgactgccaggagggctgccattcactgtctcccaccctcctgcctccccgggcactggaaatgctgggttatctccccattttcctgtggaggctggaaggctgatctacatcccctgccttgccctgccakkccgggttctgcaactcayggcagagggaycttggttaccatcttctgctcctggctttgatcttgttctcagccacctcagaacaccaccacactctctatgccctgcaacactcctgctcccaaaaccaaccctgcccccaaagtcctgtgtctgcccctctcatcctcagactctcttctgtagccactgccaggggtgttggtgttgaggttcaagacgtgcactcttgagccgctgagcctgaacccaggtccagcttccatgactcactagctatgcgacctcgagcaaatgactttacctctctatgccaagtttcctcctttatctcatggggacaatcatagtgcttgtcaagacgaattgatgtaatttcatgtaaagaacttagaaatagcccatagaacacacacagtgaatgtcagcaattatggtaagcacattcattttattttccaacttcacccctccccaaataagagtgctgagtttctttctacttaccccgacagtgccttgcttatgatgggagctcagaatcagaagacaagtttaactgcactgaatcgttgggtcttcccagcagcttttcttgtggaatagccccaagtagggccagtccctccctcgcttctggctctgcttataagggaggagggcgatgtttaaattcttaggaattttcaccggggctattccatttgaaccacagaaaattgctgatattgaacaattttcacctataacaatggcaatttcataagctcgaacctaaccctagcattcagccaactagggtttttttccactcactttggaagaggacaacttccattctaggtgtagaggtgaaatgaaagtcagggccaaggaagttatttgagtcataaggaaaattagaatagtgaggaatcagtttctccaaaacaaataaagaccaggctctaagccatttagctgtaaataatttacagtaacagattgcatcgaggcaattactatactttaagcaggacattggagtggcttgggggttgggtggcataaaattagtctcagcagcaacttcatggctttagctaaacagcaggtttcttctgaactcgtcctgctgtgacaacaagctcccttgaaggacacactgacccacagccaggggaaccttgagagtttccatgcccaccacttttttttttttcctttttgcattccccaagaagcagaacgaacagcaatataatttctaggaaggttcttccaatccatctcttggtttccatctacctaggtcagcatgagcactgtctaataatagaacttgcactgagggtggaaatgtcccatgtctgagtggtgcttccaatatggtagccactagtcacacgcggcaatggaacccttggcatgggtctaatgtaaacaagaagctgagttttttttactgaatttgattttaataaatttaaacaaccacaggtggctagtggctgccgtattgaacagtatggacttagaggtcatctctcttcttattgtcagttatggacaggaacctggatgcctcagatccctaacccaatcccacacctcaagacaacaggactttaacaattcatgctaaagtcctttttatctttccactccttgctcatgaatcaatctatgtgctgcgtattctggcagtctctgggcttgcttctatgatgtttaattttttttgacagccatcattctggaggctggaagtccaagatcaaggtgttgatggtttgatttctcctgaggcctccctccttgggttgcaaatagacgccttctcactgggttctcacgtggacttttctctgtgcatgtgtgttgctgatgtttcttcttcttcttcttcttcttcttttttttttttttttagacggagtttcactcgtcacccaggctggagtgcaatggtgtgatctcagctcactgaacctccgcctcctgggttcaagcaattctgctgccccagcctcccaagtagctgggattacaggcatgcaccaccacgcccggctgcttttgtatttttagtagagacagggtttcatcatgttggccaggctgttcttgaactcctgacctcaggtgatctgcccacctcggcctcccaaaatgctgggattacaggtstgaaccactgcacctggcctcttcctcatcttataaggaccccgccatattggattagggcccacccataggacctcatttaagcttaactgcctcttcgaatgtcccatctccaaatacaatcacattggggttaggacttcaatatatgaaacttgggagaggggaacataattcggtccataacagggagttagctttgttgcagaaagcctcaatatgcccatgckggagcttctataatactttcataatactcactactgatttacaaaaaacatttcaaaatctatgcctgggaatagcttttgccagtgcctcagactatctcctatcttttcttccagaagcaagcagcagcaacagctcaascttgaccgctcaccacccagaccctgggaccctggagcagtgcctcagtaagcttctcctgccaactgctctaaccccagaactggccctcagcctgggagggaaacaaaggcctccccgctttccgttgattggtgtcaagtgggcaagggcctgcctggccttcctgtgcaccagtgtggtttgtcccagaactatttgcagagcaggtctgaaaggctttcttggctctgatccccatctaggtgcacaatctttgacacagattgctttaatgacccatcccaggtcagcagctaacaatgccctaggttcaaatgcttgaagaagyttggaggtggaaaggccataagaaatcatctagtccaacttccacccaatgcaacagcttggttttggygtccttggcatacatatttcttcttcttctatgcacgttyttcctcttcttgcctacttctagccacaaggcgctcagtaattcatagagcaaccactattatgcatgtctagctaatagaaagttttgcagctgggcgcagtggctcatgcctgtaatcccagcattttcggaagatgaagcaggtggatcacctaaggtcaggagtttgagaccagcctgaccaatatggtgaaaccctgtctctattaaaaatasaaaaaaattagctggatgtggtggcatgcgcctgtagtgccagctactagggaggctgagacaggagaattgcttgaacctgggaggcagaggttgctgtgagccgaaattgcaccactgcactccagcctgggcaacacagtgagactccctctcaaaaaaaaaagagaaagttccactttattttgtctggttccctttatcctgccctcattgaatgaccgaatgcattaacttaggcacttaaaacgaaggataggctgggcgtggtggctcatgcctgtaataccagcactttgggaggcccaggtgggtggatcacttgaggccaggagttcaagaccagcctggccaacatggcaaaacccagtctctactaaaaatacaaaamattagctgggtgtggtggtgcgtgcctgtaatcccagctacttgggaggctgaggcaggagaattgcttgaacccagaaggcagaagttgcagtgagctgagatcatgccattgcactccagcctgggcaacagagtgagactctgtctcaaaaagraaaaaaaaaaaaaaggaagggtattagggaataatacatagaggttaagagtatggcttcagagtcctgcagacttgcgtttgagttcttctgccatcttgtgatcttgggcaaattacagcctcagtttcttcatgtaaaatgggaataaaagtcgcacctgtcgctttgtgaggaaggcataagctaacgtgtaaaagcacgcagcacagtgcatggcacgtagtaggcctcatcagtgtcagctaccgtgctgtgattgttctgttaatattaatggtagagaagcctgggcagggctggtggtgcatgccgtcgtccttgctgtcccttccccaccagacgtggacttctgcccacaagcagcccggtgctgccgcacaggagtggacgagtacggctggatcgcggcagctgttggctggagcctctggttcctcaccctcatcctgctctgtgtggacaaactgatgaagctgactccagatgagcccaaggacttgcaagcgtgagacccaggctcggtgcacaaaatggtgatcgccaccaatttgtggctaatggggaaggggagtaaggctaacatggtttctattatttaagtcattttcacctttaagcttcagttacttttacaagggaaagaagaaagagcgggagaaccaaataaggcaagccagtgctgcccttgcatgtcactcccaagggsccctgggctgtgcccaggtaactcctctctcaagatagtccctctgtaatgtatcctgttttaacctttcttctaggcaccaagggaggtgcacaagaaactatragacttagtctcatcatcaacattttcagaagcaagtgcataaccttctcaccaaaaccaggttatytgctyctgtccctggcttgagtccygggcttaactgtcatttcagaatctgagaatcagtcaggtatggtggctcatgcctgtaatcccagcactttgggaggcagaggtgggcagatcactcaaggtcaggagttccagatcagcctggccaacatggtgaaaccctgtctctactaaaaatacaaaaattagccaggtgtggtggtgcacacctgtaatcccagctacttgggaggccgaggcaggagaatctcttgaacctcggaggcggaggttgcagtgagccaagatcatgccactgyactccagcctgggcggcagagcaagactctgtatcagaaaaaaaaaaaaaaaaaaagaatgtgaggatcaggtgggcatggtggctcatgcctgtaatcccagcactttgagagactgagacaggaggatcactttagcccaggaattcgagaccagcctgggcaagatggcaagaccttgtttctgtttaaaaactttttaaagttaaaaataaaaatgtgagaatccccttgacactcccaccatcttcacccccacctcaggtccttctccagctctccttctggcttcatcctgtcttccacggctctcctgtcccacctattctccctgccggtgcccaagttttagccttcactgccttcccctagaacacgccagggatattgcattctgtcctcactgtcttgaggatcttcctccccggctcatcactccccatgggcagctgccagggtaggcgctgtcaccttctgttgacaacagtcagtagctcctaaggactaaaactgttcagcccagcattcagctctttggaggagtccatctgtcccccagcacatccaggagtaaggattccgactggtccactcctcatcctggtgtcttcagcttctctgctgccatgttctttgctgggatggctgcttcccaactccacctccagaatcaaggatattcctccaagcccagctcgaatgcttgatctgcctggagccttcctggtcatccttgggtgacctggagctggtgctgttagagcacttctgctctgccctgatgtgcagttgttgtgaatgggccactccatagtttatccttcctcacacccctggggcatagtaccctattcaagtttgtccaatgagtgcatgggtgaattaatgaatgaatgaacaaatgagtctttgccctagacaacttaaggtcctcactctgcattaggagcctccatttttctccagatggttgaaataaccagcctctgaaggagccaatggtttggtcactgctctctcagcaaattacagtcactgtcacttagcatggagagtggacgttgcacatcactgtgaaaccttgcagaggaggagagggcaggttcatcagaagaaagaaaggacaaaatgactccttatgaagcattttgtgccttctgtgagaaaacatgtatttagatcagataaactctagtcaaaatacaaaaaggaaaaatgaaagacctctgaaataggaacaatctcttgaagaggcaaatgactcaaaactgctcagtggctctttcagaaaatctaagtaaagttccctgacaacagaaactgaagagattgcctggttcatcttgtagtcttccaaaacagcagataatttctgaatctcagatgttgaatcagtrcaacgggatggatttcttgttcctaagtgttaaatgatcacatacataaaagagtctgagcctgagcaacatartgagaccctgtctctacaaaaaaaaaaaaaarattagccaggcgtggtggtgcacactgatagtcccagctactcaggaggctgagggaggcggatcamttgagctagagagttcaaagctgcagtgagccatgtttgtgccactgcactccagcctgggcaacaaagtgagaccctgtctggaaaaaaaaaaaaaaaaagcgtctgcataattcctggtgcattttgtggatatacaatatgagtatgtgttccatgttttcagaaattcaaaggaagcgtttccacaatatgtgacggtttatttcccaagagatgaaaagattcattaaggtgcatgctttgatttaacatctgcaaacatttaaaaaatataacagtgtgtgacgtagcagtgagagtactatctttttttaaaaagggaaattaagatttatttctggccaatgtgaacagaaataagtcactttatctcactgagcaccaattttacacgtggaaaatagaagaattggaccaaatcagcagtttcaagctgagttgcaaaagttcatggaaccatttcagtcgcttcatggaatcggggtaggcatgaggcccgttgttctttcaacctgagccgcatggctcttgtgtctttaaaccttgtggtaggatttttttttttttctgctttaataagtgaagggtcagggcaccagttggtgtctgagatgccctccagtctggggaaycccgtagatkcttagactactttgaactgaagtatgtgcagtctgccatctcacattaaaatgtaggcattttgtcaattgcttttctttcatctgcacaagaggaaggagagaacgaatcaatacaaccactcttttccttgagactgcaaagaaaatggttctatagtttgatggttctacttcccagatgctacctctcagatttattctcaacagaaaattttttgattacagcagaccagatctttatctgtcaataagttaaaaaagataatctgggctggatgtggtggctcackcctgtaattccagcacttcgggaggccaagacaggaggattgcttgagcccaggaatttgagaccagcctgggcaacatggcgaaaccccacctctacaaaaaaatacaaaaaaattatttgggactggtggcgcatgcctgtggtcccagctactcgggaggctgaggtgggaagatcatttgagcccaggaggttgaggctgcagtgagctatgatcttgccactgcactccagcctgggtgacagagtgagaccttgcctcaaaaagaaaaaaataaagaaaagaaaatctgaaagggaaagcaggcatcaacttccagggatctaataacttcctaacttaaagcaacagaacttacctaacttttggacttttcattttaaaactttgcctctagcagtggacactgtcctcaacacagctacagtttatgtaacacagagtccatattatatggggcatgtctgtatcaaaatgtcatatgtagaaataaagtattaaatrttaaggtgtggcataattatctgactttaaaaatcatcatttagtggccgggcatggtggctcacgcctgtaatcccagcactttgggaggccaaggcgggcagatcacctgaggtcaggagtttgagaccagcgtggccaacacagtgaaaccttgtctctactaaaaatacaaaaaattagccgggtgtgatggtgggtgcctgtaatcccagctacttgggggactggggcagaagaattgcttgaacctgggaggcagaggttgcagtgagccgagatcgggccactgcactccagcctgggtgacagaacgacactctgtctcaaacaaataarttaattaaattaaataaaaatcatcatttaaaaatctattcctggccaggtgcagtggctaatgcctgtaatcccagcacttcgggtgtctgaggtgggtggatcacctgaggtcgggagttcgagaccagcctgaccaacatggagaaacactgtctctactaaaaacacaaaattagctggcatggtggcacatgattgtaattccagctacttgggaggctgagacaggagaatcgcttgaacctgggaggcagaggttgcggtgagccattgcactccagcctaggcaacaagagcaaaactccatttcaaatatattcctttttatatgcatgacacctaatgcaaacaaaacaaatatacaattttttattaacaaataaatgttacagcatgtaagattaatcagctggacctggtggtccacatctgtagtcccagctgctgtggaatctgaggagggaggatgactcgggcccagtaattaattgctttgagggtgtaatgcccaatgatcgtgcctgtgaatagccactgcactctagcctgggtgacacagcaagacattgtctctaaaatgaaacaaagcaaaacaaaaaattaatcaaaaacaagtcttaggatagcttgggccttgtcttagtcagtttggaccgctataacaaattatcatagactggggagcttctaaacaacagatatttattcctctggaggctggaagtctgagatcagggtgccagcatggctggtttctggggagggtccacttcttggttcatggacagccatcctctcattgcatcctcatgtggtggaaagagggcaaaggagatctctggagccccttttacaagggcactaatcccaatcgtgagggctccacccttatgacctaatcacctcctaaaggccccacctccaaatgccatcaccttgggcactaggattcaacatcaattttagggggacacaaatgttcagtctatgggaggcctcatttccacaaaaatatatagaagcatatttttaaacttggagaaatattaatctagatgtttctgatgaagaaactgctctgtctgaactccagcatccattttgaagtcatctataggggatcttccttgccatgtggtaggagtgccttgtatacaccctctgcctgccacctacttccagccttacctggctccagcccctcctcctcacttcttcsagagtgatctgtctaatacataaataagtgatcaaatcacccccttccaaaatccttctgtggctctgcacagctgagggaacaggatttttactcagggtgagccaaaagagctctgtaattggatctccagacatttctctagctttatctcttgcatatccttcatgcaaacagggtttgaaatgattcccattccctaaacactctatcctcctggccttcatttttgctgttcacatggcctggaacgtacgtacccttccccagaggaagatctgctgtgaaccaagagaagcttacactycaggcctccttacttgaatgggcccctccgagtccctgagtctaacactgtattcctaatttttctatcctttttttttttctaaaggcaacctccccttaattgtctacatttaaggccccataaacctgggcctgcccttgcttcccctcatcctccccggccccccactcccagttggattttggtttactgagattggtcttccaagtcaagttgcctcttcctccctggatggacacacacacacacacacacacacacacacacacacaccttccttgaccaaactctagccaggcgtttttttgagccctcttcttgactagaccttaaccttggcttataaaaactacagactctcagcataaatgatttcatccagtctcttcccctcacatgtaaagacttgaccaaatactaacacagcctctaacagctccaggctgcacccctaggatgagcaggaggtcgagactctgcctgggagatgcagctggaggtgagtgatgccaggccgggtcccaggcacatcatatgcacggcacaaaggtgctgttcccatccaaacagagctaacctatgtgagagctgggcgtggcaggggtggggaattcaggactcttatccaagtcctggggcagccagaagcccccttccagtaaacccctctaacaaacccacactgcacatgcacacatacacatataccccagtgctttgtcctggacgtgctctggggatccctgagctcacttccctcccctgcccacagtccacag

SEQ ID NO: 9864 - DNA, 18238 bp, Homo sapiens
  misc_feature (17990)..(17990): n is a, c, g, or t
cttgcaagcctcagcctgattttatgattcgcacacctgctccatgggtatgacctcatccaacccctgtgaggtccctcccatttccaccccaccgcaacggaagaccccttcgcagatgagcacctgacacccagagagctgatgcttctcacaaggggcaccaggaccccgagaaccattctcttgattccacttctgcagcctgggtgaccttcaccagtgacccccgcactcccgtctgctcatgtgttaaatgaatgaatcgtcataatttactatatgctctgagctcctaacacaaactaagtcgttactcctcgaaaaactctacgaggggatcctctgattttaaggataagaaactgagacacagagaagaaaaaactcttaccagggtctcccaaaatagtaagtagtggaacagagatctgcacccatgctgtctggatccagacccagcgccctgaaacagcagcttgtctggttccagaaggaacggaggccgtggtgagactaagttagaagagggccagcacctcatggggaggcccttcgggcaccacgagtccagtcccgctccggaggtgggcrgtctgcaggccccctgagaagggggtttgaggggaggctttttcctgctggggaatctcaaagggcttaaaactgcagaccgagaagccgggaccttgcccaggggtgatggggagctgcaagggaaggctgtgagcaggggaggggcggggtgatctccaagtgcagagagaccctctagggccacgtggtgaccgacaggaggctgtcctcccggacaggaggrgcgagggtccagagagagaggaggacgtctgagctggagccaggccaaggggacagagaggaggggacggggcagagagaggcaggggccgaagggacaaggctggggaccgatgggctgtaggggataaggggagagatggggcaaggtcagtgccaagggcgtctggccgaataactgggtggtcggtgacgctgcccctgagatgaagaacgtggaagaacagggaaggagggtttggggamatagagcaatgagttgggactcggtaagtgagaggggcctagggacagtggtgcagggggcgcccaggagcaggtggctgcccaagccggagttcagggtcagatggaggagacctgcgtggttggtggatgaaccacgggagttgatgaaaaactcccagggaacgttctcaggaggaggagccgggcaaaagtgagactcaggccgcggtgggcgggacccaggccgcggtggaggtgaaggacgtccgcggacacgtccaggaggacatcgatcgcgcgagcctgagccagacacagtgggcggggacggggcgccgacgtcaccgcgtgggggcggggctgcgggagccgctggctgcgcgccctccagggagccgagcgcagaccgggtgcgcgcctgggttcggcgcggcgggagcgccctcagtgtccccgtctgtatcaggggtgcttcatcagtacctgcctargctggttaggaggaggagcacgtgcgatcgtgacggraagcgctcakcacagacctggcaccgaggaagtyccaggggctcggctcctttccctcgtcaccaccgcgccccaacagagggaggcggctgcaggggtggcggcgaaagggcccaccgggcgttccggagtcggaacactgattcctctcccgcgtggcctctcgcttctgcaggaaccttgcttgtgctgcctcctgtctgggcctcagtttcctccgtattcagcaggaagccataaggttattaatataaacacctcacagggctgccgggagccggagtgagatcctacaaagagagcacttggcacggaggagtggcctgcagccgcattccataaacagggctgctcagctgaagcggtggcccagggtgaggcccgcagactttgagcatcaatttgtggggagggaggcaaagggacataggagttctagaatagcttccaacctggggatctattatgtctgccggtctgggcttgtagaatgtctggagacccgacgttctagaatgcatgaggtttctggggactccagagtgcccgatgttcgaaggttctagagtgtttggagctctgtggttctaggctattctaaaatcttaccttccagagtgtcctccactgccagaatgtcttagggcctgtgcttttagaatctgaaagtctgatattcyagaaattccaggggcctgtarttctagaatggctgaatccttcccataaagatgatgactttccacacatggggagagaccacgcttacaacaggtcccatccttcactgggtgacctgagtgaggtcagtccctcctgtctygggacctcctcattaattaagccaaaatagactctagataattgcttggggccctctggggttctgagacattggaagccagcctcaaatacccaaagccttgggtcatctcagtgatcatctccagcctctgggatgcagaatccagatttcaagctctagaacccagaaataagactacaggaccagartagagaccctgggttcccagactctaaattcagactctagagtcaagattctagcaatctcagaatcgtgaaagccaggtccctgtctctcaattcagccttttaaaaatttatttacttatttatttatttatttagatttttcatagagatgaggtattgctgtgttgcccaggctggtctcaaacccttcagttccagcaatcctcctacctcagcctcccaaaggcatgagtcactgggcccagccacagtccaggttttcaatgcaaaaacagatttgaaactccagactgtatgttccaaagtctactyctgaaagctcagaggctagatccaccctgtagaatccagaccccaagcctggcatggtgkctcacgcctgtaatcccagcactttaggaggctgagtcaggtggatcacttgagatgaggagttcgacaccagcctggccaacatggtgaaaccctgtctctactaaaartataaaaattagctgggcgtggtggtggtcgcctgtaatcccagctactcaggaggctgaggcaggagaatctattgagcccaggaagtggaggttgcagtgatctgagatcrcrctattgcactccagcctgggtgacaagagcgaaacttcatctcagaaaaaaaaaaaaaaaaagaatccagaccccacaattcaaaatcccaaatctaccatttgtagtctaggccccaggcttctcatagcaggtgcaaaggtttccagcctcgattgccagattccaaacaccagattccaggctcctattgtgggttctarattcgaatgccccgggatccagaatcaaggttcacgatctgtcactcaaaggcccgactccaggatccagattccagacccccagcccaagaactcagactttgaaatccatattccagactgcaggtcattaatctccaactcaagatcctcaaatccrgaatccaagacccagatccagaaccagatccggatccagaacccgggatccagaactctgccccaagcccaagaacagggactttaggatccagtttccacactccagaccccaaattccagactctgtcttttgatctcctcctaatttctgtttttgtcctcctgtcccctcccccttgaggaactgctcctggtggagaattcctctttgtggactcagacaacagcttcaacctaataaatgctcattaggccaagtctcccaccccaccagcaaccaaggcgtctctgcctgtaaacctgactctcagccacctcccaccccaccctacaccaccacacccccagacccagctgggactgggagcttataaattcaggcatcctggtacctgctcccttctggcacccaagctgccctagatgctgctggaggatctggaggaggtgagagctttgagacaagactgagggaggggcaaaggggagattcactgtgccctggtttcaaggggaaacgttgaccacgcttggagaactgagtgtcaagggcatgggtagatccacgtgtcctttaccaatgccccaaattgaacctgaaccaagaaaatgtcctggaatggccagaaggagctgcagtggtggggagggagggggatggagtggatcaggaggacgtccctgaagtacttgtatcagagccaagaacgtggtcaggagtgatcacgggttcaagtcagttcagcacaacctcccggaggcctcctgtgtaccaggccccaggtggggcagtgctgaggtcacagaaagaacctgacctgagccccatcttcaagacccccagatggagaaaagaacaggccagacctcagcaagtatggggcatctgcrctgtaatggagacagaatgggtgctgtgggattcaggggagacacctgttaggtgttggggcctcccagaagaggtgggggcagagtgtcagaggacaaagatgaatttggaagatatggggaagaaggatttcaattcacyctcaaagcttcctgaggcctcccgtgggtcgggccctgcagtactggagacccagagtggagtcagaccagctcctcggggagctgccagtctcgtaggggaggcagacaccactgagggtcaggggaggtcagagaaggcctcaaggaggaagcggggctggaagggaatggcgttggatatgcrgtgggaggaatagcctaagcatgaaatggcaggagggaaaatggcagcactggctgcgtctaggacarggtcatgggagacccagggagaggggctggaagggaagaagccacttttgtccttgaaagtgaggctggagccaggcaactcatgcctgtaatcccagcactttgggaggctgaggcgggtggatcactagaggtcaggakywcaagrycagcctggccaacatggtgaaactccgtctctactaaaattacaaaaattagctgggcgtggtggcacacacctgtaatcccaattgcttgggaggctgaggcaggagaatctcttgaacccagaaggcagaggttacagtgagcggagatcacgccactccactccaacctgggctacagagccagactccgtctcaaaaaaaaaaaaaaaraagaaaaaaaaagaaagaaagtgaatttgaagagctggactttatcctggtggtgccaaggatccatggagggtggtgagcaggggaggggcacagccagctccagatgtagaaagaccctttggggtcatggctggagggcaagctggtggaggggactggactggagggggacccaaaaggccagataagaggttgagatagaccaggcgcggtggctcatgcctgtaatcccagcactttgggaggccgaggtgggtggatcatgaagtcaagagattgaggccatcctggctaacacggtgaaaccctgtctctacttaaaaaaaaaaaawttccaaaaaattagccgggcacggtggtgggcgcctgtagtcccagctactcgggaggctgaggcgggagaatggtgtgaacctgggaggtggagcttgcagtgagccgacatygtgccactgcactccagcctgggtgacagagtgagactccgtctcaaaaaaaaaaaaaagttgggacaggggtccttggtgatgatggagagagatccaggggctggtagcatggtgctggaggctgacaggtggaggaggtggggcagggtctgtccgagtgcctagaggaagagtaaaccttccagagatgggggacccagaaggaagcgcagagtggggttgggggaaggggataccrgtggtcagaagaaatttattaacagtggatgggataagtctgtgtctggagggatcctggtggaggcagaagggtcctgcctcacctggattctctcactccctccccagactgcagccgaaccctggtccctcctccacaatgtggcttctcctcactctctccttcctgctggcatccacaggtgaggtggccccaggagggggccaggtctgtgggagcaggtgcccccttcccaagcatgtctgggcccagtgatctgccagcccctacctcacccagagaccactaaagatccttccttcaccctccacctgtgccaatgtccctaagcccttaccgtcaggtgctggtgctgctgctctggagtcgctatgttgcctggggcctctcgctgcccacgacaaggaacacggtcctggggttacacaaacctgagctgagtcctggggcaaccgcttccttgctgtgtgtccttgagggaactgcttcacctctctgggcttcgaatgccttctctataagacagcacccrcttgagacaataacagtgaggtctcaatagcataacagaggtaatatacatagcaagcattagacaagtgctgagaggccaacagcacagacagactccagcttgagtcccacrcctgccactccctgtctcttacagggtctttgaggggattaaatgtggttgtgtgtgaggcagaagcataagcctggcycaggtagtgcccyttcaggtgtgcaagccaggcacggtgcttagagcttacatacaacgtctatgtgtggtgggcaccmccgacctcatttgacaagggaaggggctgtggctcagagggacggccacaacatcaaggtcaccttgggtgtcaggcaaactccagattgaactcagctgccacacaccaagaaattaattgtaacctgatgcctctcttctggagaaattggggggtggactttcattaacgttctgccacaaatgaccctcactcctgggggcccytsagacccccacgcctccagcctcccctccggctctctctgtgcactcacctacctgcctygcgcctgcctgctgcgcccagctggggcctccaccttcctctggcttggactggccaggtgcagcctcggtgcccagctgttcagcccgtaccctccgcccttcggaggacgacctcacccttcctttgttaagcccctygtccaccacatccgcattcccctggtctcacgggggcctttggcccagttcctgactgtgatggggagagtgtgggcatttggtctggctgtgcaaatcctgcccctgtgtgggtgggagtgtgcatggcttcaaccttcaggggatgcatccacattgcccagtggagaggggtcctggtcctgtgaccttgaatgtctctaatcatgtccttaagcataatgccattctgtgtgtgtgtgtgtgtgtgtgtgtgkacatgcacgtgtgcagkgggtatacaaggccctgtatgttcacatcctctccacatgcatgagccagatccccatatgtgaaacccaatcagtgactccacagatctggcttgggggctgatctagagatggataaatatgtcctgccctggctgcctctggcttcagctgcatgtctytgaccttgaatgcccagccccgtgtctgggtgctgccccagacagcaagtccacatctgagtgttggccttctgggttggtgtctgcagctctaactctacaaaatgtcttgtgggtgaatcacggttttaaccttgacttttttttgtttgtttggttttttttgagacggagtctcgctctgccgcccaagctggagttcagtggtgcaacctcagctcactgcaacctccgcctcccaggttcaagcaattctgtctctgcctcccgagtagctagaattacaggcacgcaccaccacgcccagctgatttttgtatttttatttatttatttatttattttttagtagagacgggatttcacgatgttggccaggctggtctcaaactcctgacctcaggtgatccacccacctcggccttggcctcccaaagtgctgggattacaggcgtgagccaccacacctggccaaccttgactatttattataggtaattctgtgcagatgtctgacttatgttggccatctccaggatggacctgaactttcacacgtatgtccctrtgactaaatccaggtgtcatttgcaaaaaacaactaatattattaagtagctaccagggctaggtatcactcaccatacatacacacatgcacacacacacatacacattcctacctcatccttacaacaatcttcattttacagatgaggaaacagaggcacagacaggtcgaataacttactcaaartttcacagctagtacattcgaacccaggcttaaggacccatctttgtccagaccctgtatgcaagtgtctgtgacactggatgccaagactcacactagagatgttgaatttaggtctgaacaatatccaattctgtgtgtgtgtktktgtgtgcatgtgtgtgtgtgttgtattcatgtcttaaccatccatattcatatacacatatgaacatctgtgctgtgattcttttttttttttttttttttttttgagatggagtttcactcttgtcacccaggctggagtgcaatggagcaacctccgctcactgcaatctccgcctcccgggttcaagcgattttcctgcctcagcctccagagtagctgggattacaggcacccgccaccatgcccagctaattttttgtatttttgttagagacagggtttccccatattggccaggctggtctcgaactcctgacctcaggtgatccacccgcctcggcctcccaaagtgctgggattacaggcatgagccaccgtgcccagcctgtgctgtgattcttgaagctgcaacccatgtgcatgcaagtgaatttcagcttccagtcctgtccatagctgtacctaagtgtggaagctggatgtgcatgtatgcatgtccatgaccttgtatagccacatctgggactcatactgcacactgaatttggctgacatgtccagactctggggccaaggctgggtcacacatactgagtggccacatgcgtttgacgtctgtgacaatttggtgaccgtgaatgactggtttcaagtgaccacctgtctgaacctgtatccagtgcccctgtctccacccccaaccacagaggacttcttgccctctggtctgttccccttsctctctctcccagagtcttatagcaaatggggtgggggctagagttctggagaaaacaggcagcggttgtaaataaacaacagggcaggcggagcatggtggctcacacctgtaatcccagcactttgggaggctgaggcgggcagagcatttgaagtcagaagtttgagactaccctggctaacatggtgagacctcgtctctactaaaaatacaaaaattagccaggtgtggtggcgggcacctcagctactcgggaggctgaggcaggaggmtcacttgaacccaggaggcggaagttgcagtgagctgagatcatgccactgcactccagcctgggcaaaagagtgagactccgtctcaaaaacaacaacaacaacaaaacaaaaaacagggcagggtgtcttgagaagttaggggaaaggcataggcatatagtagttagggcagggtgcaaggaaggtgtaggaggcaatgtaaacgtccctgtcctcaggcatcctctaccccttctcttagcagcccaggatggtgacaagttgctggaaggtgacgagtgtgcaccccactcccagccatggcaagtggctctctacgagcgtggacgctttaactgtggcgcttccctcatctccccacactgggtgctgtctgcggcmcactgccaaagccggtatgaaggcaggggctcarggtcctgagggagcctggttcggggggaagagctcctakatttgggggaagacggaggcagacgccasaactcctgggttctgaaagacgaggaggccggatgtcaagcccctgggttaggaaggagtgtgtgtttcaaagccttcgatctctgaaggaggaaggagaagactagttccagcttttgagcctcagttctagggatgtgagaatcctggattcggggacagaccaggagggggctgggagtagttggaggggatcgagttctaggagtgtgcctgacttcagactcgttggtccttgaggagcaggggctggaaccattggcttcagggtcttgggaaaaggtaatgggatgtcgagatttctaaagggtcgggagacctcgggttgcccactctttgatctttctgtcctctacttgcgggtaaccactggcccgcactccactggcgggaaaaccactcgcccgcacagcttcatgagagtgcgcctgggagagcacaacctgcgcaagcgcgatggcccagagcaactacggaccacgtctcgggtcattccacacccgcgctacgaagcgcgcagccaccgcaacgacatcatgttgctgcgcctagtccagcccgcacgcctgaacccccaggtgcgccccgcggtgctayccacgcgttgcccccaccygggggaggcctgtgtggtgtctggctggggcctggtgtcccacaacgagcctgggaccgctgggagcccccggtcacaaggtgcrtgaaaggatggagctggatgcgaggcctcaaggaatcctatgctccagggctcttgggcggaggggacaagggccggaatttatggatytgctccaagtccactgtcttccccagtgagtytcccagatacgttgcattgtgccaacatcagcattatctcggacacatcttgtgacaagagctacccagggcgcctgacaaacaccatggtgtgtgcaggcgcggagggcagaggcgcagaatcctgtgaggtcagagcctagaggggccatcaggcggaagaagagggatggggacaggtgtgggagtccggatggggttggattttctttgctttgggccagagaagatgctagggttaggcttggagatggagtaggaagagaagttagaataggggtgaggttggarttggggttataggtggggattgcgttgtttgaggtggataatgtgatagttagtttgagatggcatgggttggggttgagaatgggaatggtttggtttgattctgggtgggaaatacgtcagggttgaattgggatgaggtagattttgtttggaatgcagaagacatgaagattgagattggattttgagatgggcatgggtttgatttgattttgaatggtgaggatgtgggctgagttggatttaacttagtacagttgcactggagttgcatgggggtragattggatataggttgggtgagttgtattgagctgtgttgaattggggttggggttggggttgggttggctctgtttgggataaactgggctgtattgagttgagttgggttggggttccctgggatggggatggattgggtttggggtgagattgcaamtggtgattaggatgaggatgaatccaggaggtttcacycaacctgagaccccctcttttccccacagggtgactctgggggacccctggtctgtgggggcatcctgcagggcattgtgtcctggggtgacgtcccttgtgacaacaccaccaagcctggtgtctataccaaagtctgccactacttggagtggatcagggaaaccatgaagaggaactgactattctagcctatctcctgtgcccctgactgagcagaagcccccacagctggccagcagccccgcctgacatggaacagaacggagccatcccccaagaccctgtccaaggcccagatgttagccaaggacttgtcccacctgaggacaaagctggcgctcaaggtcacctgtttaatgccaagataacaaagcgctgatccaagttgctctgtaggaatttctgtgacttttttctggggtcaaagagaaaccccragacactgtacactgttccttttcacccaccaccccgatccctaggtgaggagaagcrgcttgaagcagggctccattcattcaacacacatgaccacccgtgtgatcttgaacaagaggcccaatctcacttcgcyttggtttccttatctgtaaaatgagaccatcttattgctgacttcmaagggctgttgtgaggattaaatgagatgattcgtctgaactgattaaaatcgtgtctggcactgagtaaataccctctatctctggatcccagttaaaggacctaacagacactagattacsaagaatggctttttctttaaggtttagttctgggccgggcatggtggctcacacctgtaatcccagcactttgggaggccaaggcgggcggctcacttgaggtcaggagtgcaagaccagcctggccaacatggtgaaaccccatctctactaaaaatactaaaaaaatttagccgggcgtggtggcacacgactgtaatcctagctacttgggagggtgatgtgggaggatcgcttgaacttakgaggcaggagttgcagtgagccgagatcgcgccactgcactccagcctggtgacagagcaagactccatctcagaaaaaaaaaaaaaaaaaaaaagatttasttstgggcttcctggtagccatggcaaaaaggcaaatactgtcctttycttagccaggtccctgatatacarcaraggctggaaytctgagctgctttgattttaccaaaaagccaagacaacctgttggaagcctatgggtttaccattgaggctgcaggaatctagttcctaattatcttcagagaccacaaaatgtgatgttcaaggtcgctgaatgttgaagtacatgaacctggctcgtgagacctaaatattgtactggtggtgggggggaagggtcattggaatctgtggttagcctgatcttgacctgggagggaaggttgtccagatctctgggactttggaggacaggacgttgagcacccmtaactgggagcaagaagtgggaggctcattgagaccccagcattgtttgggagggacaytggattttgtaatgctaaagaacttaccctgggagacccctgaaacttcacattcctggatctggaggcactaggaatgtggtgatgtgtaccccaaaattttattatgaaaggaacagtagctttggggacctaggtcctgggtctgggagtgcaagaaccagggcattctgaagkccaaggcttatatttcagggggaactggcagctgagatgctagtatcttggctccgagtggtgcagggaatcagagccctaactgctggtgtttgagggcaccaggtctgggggtgcagggccttaattgagactgaggtatatggggctttgtaccaggggtcactgattcctccgtcttcctgtttctgcttcccctcagtccccccttgcctcactggctgctccccagagcaaagccccagagccacaggccctgccccacctggcttcaaccccaggaatgcgtccagcgtgatccagggcctgcagaacaggtgctggttctccctccccgtctacagctctggggatcggrgssgggggggcaattgtccagcccccaggcaacaggggaagggccttggccaacatctgggtgccagcagggcaggggtggggctctgaggggataagggcttttaaaagsctccccagggaggttccccagttcctccacctgctggcccctggacacctctgtcaccatgtggttcctggttctgtgcctcgccctgtccctgggggggactggtgagacagtggggggatgtgggagggggaacgggccctgattctcttgctggcctcacatccccccccgataagaccttcccctccaacaccccaccctcatccctctggcycacagtctatcctagtccggggtgccccggctcttatctatcttgcgcggscccaccctaaacttccacccccgctcctccatgttgtcatagtgytcactcccacaccagattcctgctcctcccaggaagcctcagtactttctcctcttccctagccaacgccctgtcccaccgctttaccaaaggggcagattctgggccatctctgtctctctctggaggaccccaaccctcccatgggcttcccccaccccacaggactctgatcatcccctcctgycccctagttccctgcggccacctatttggctcctgagtctacaaatcccaccacactccagtgactttttccatccagctgtccgctctcaactgtgtcctccagaccctgacatctggtctccccagtccttccagggtcccccaaatttcaccagaaaaccctgcttcccaaactggcatgtgggatcccccayctggtatgkgggggggtctgcaaatgtcccttcccacccagcacccccagctctcccaggaaaaacaccamaccctcccaccacatgctcctttccttggggaagttccatcccgccccaggccccagcccttctctgcctgaattgttcctacacagctctggttttctggaaccccacsccaaggatcctgaatgccttctcagccagcgcttctgccctggcctcccccaagtcagtatgtgattctacaacctcacrtcaagtgggtcctgcattgcattcccacagctgcttggcgcctgttctcaccacttctccaatcctcttcctaggattgcctccaagaggaccccatatccttccagtaccctcagaccatgaaccccatccccatgagaaacgaagatcccatccttcaccctgtccgagaaggactgccactcacgcctccctcctcctgagccccgtcccagtcctgaccgcaactgtgttctcagggccccaacctcccctcakattgccattcctggttcacaggaaggaccccaaaacctctcrgaagcccacctctagccttaaccatagccctttcttttaccctttaaccaggaagccctgaaatctaactgtcccagccaagctggccccttccaaccccaatgtagggaccccaagtcacccccaaactcttcagtcsagatgctcttctttacctctcagacctggtyccctaaagctgcatcctttcctgaacctcaaaagcccaacccaggtcctgtttccctagcctaggagcccsttagccctccagattcttcctcagtgagcctctgatcctgtcccacccttggcgccttgatscctggtttccagaatccytttccactcccctaacccaccacctcccatcccccagccccagaccccaaatgacctgacgcccagatgcagtgtctgctccagacactgtctcctgtctcctaccctgatccctggaggctgctctactgtcagagcacaaaatctccccaccaggtccagccaccactccaaaagcccagggaacagtccagagtcccaccccttcccaacaccccttgcccatgtccccaacctccagccctggtcctctacccgcaatgtcccttcagacccacagcccagctccctctcctagccttgtccctggcctctcctgccaaccctgcccttcctgacccagcaccgcctctgcaggtgctgcgcccccgattcagtcccggattgtgggaggctgggagtgtgagcagcattcccagccctggcaggcggctctgtaccatttcagcactttccagtgtgggggcatcctggtgcaccgccagtgggtgctcacagctgctcattgcatcagcgagtgagtaggggcctggggtctgggaggagggcatctatgctgccacaggattgacaggccagtggcattccccttggataacctcaggcaagactggggggctgagscagagaggaaggctctggcgcaggtcgcctggcagggcagagctgggctggacacccctctccaaggctgcctgggtctcttgggatctggttctgcttgtgtctctgtgtgactgtgttctggtctctgtcttcctctctctcctctgtctccttgtctctgcatctcccctgtctctgtctgtctctgagtctctctgcggcatctctgtcactgtgtctcaccctccatctctctacccatctctctctctctgggtctctacctcaccgctccctcatccctactaaacacacacccagatggacctaagggaggccccagagtaaaggaagggctttatccccaacttgtgtgcctgggagggggygcctctccctctgtccagctccccgccccacaggatatccctccactctggagagacacagggaagggctggtttcagcgggagctgggtggggcaactgagggaggaggaaggaggaggcggggcgagaaacgcgcgggagggtgctgggaagggaagggggcctcgaccttggacttcaggccaggccacctgcccctggggagcccgcaccacagccccagctgcagctgagccgctctcaggcctcccctcctccctacctgcccccaccctccccacctgcccccaccctcccccagggcctccctcccttttctctcccacactcggtcactcctgcttcctctctgcctctgtttctagttctcactctgacgtcccgcgtcctttttcatttgtctgcttctcgctcccttccrtgttctgttccctcttcctccctcttccctgggcctgtttctcgctgtccctgtcttttatccttctcatctgcctcttttttgctcaccctgtttctcactgccctcccctccgcctttytcacccctctgtccttttgagctcttttttgctstgtctcttcatttgccttttgcactctcaaamtctttcatcttcccattcgctgtctgtatttctccataactatatctttcttcctctgtctccgcccacccacatttttctctttccctttctctctttggggaccctcccccatgctcccctgccccatccccttttccccttcccrtcttctcatccctccattcccatctttccccagcaattaccagctctggctgggtcrccacaacttgtttgacgacgaaaacacagcccagtttgttcatgtcagtgagagcttcccacaccctggcttcaacatgagcctcctggagaaccacacccgccaagcagacgaggactacagccacgacctcatgctgctccgcctgacagagcctgctgataccatcacagaygctgtgaaggtcgtggagttgcccaccsaggaacccgaagtggggagcacctgtttggcttccggctggggcagcatcgaaccagagaattgtatgtgggggcagactgtgtagcccaaggcrgggatggggactcctgygtccaagggagaaagggccagggaagcaggtgaggtcgggctgcagccctttttctcccgggttcgtagtctcatttccagatgatctccagtgtgtggacctcaaaatcctgcctaatgatgagtgcraaaaagcccaygtccagaaggwgacagacttcatgctgtgtgtcggacacctggaaggtggcaaagacacctgtgtggtgaggcagccctgcccccagggtctggaagggctgagggaggggactcagcctstgaactggyttctgagagctaaccaggcatctgcttcactgcttcccagctagctgtagccactcgccccatcagtgccccagctccccctccttcccccgcccatccagggacaactgcatctcaccccccacaccagagttcaccgttcctcgtggtaatgtgttgttaccgtcgagtcagagagtagtcctggagaggtggcctctgcgatgtgcccrcaggggcagcgtcctgcagatggtcctgcccctcctccccctracctgtctgcaggcactgtccwcctggaccctgccccatgtgcngkmgctggaccctgaggtcccttcccccttggccaggactggagaccctgtcccctctgtgggaatccctgcccaccttcctctgggagtgggcactggaggccctgtctgcgagctggggctccccaggcagaacttgggccccgtagacctttctcactctcccctcccaccttgtgctcccagggtgattcagggggcccgctgatgtgtgatggtgtgctccaaggtgtcacatcatggggcta

SEQ ID NO: 9865 - DNA, 29871 bp, Homo sapiens
  misc_feature (12378)..(12397): n is a, c, g, or t
atacaaaatacagcgcctggcacagacctggtgcttatcaggtatttgcacaataactattttgcagaatgaacagcaggcttaaaaaagcagatgcccatctgctcattcagagcacccagctcccaagagcactacaccatcagcagaaattggaaacattccttcaccaccaaaggtgaggccagcagtgtctgtgactgcaaaacatgtacccagcatggggggatccagtggtcaccgccccattcaaggcaagcacaggtgttttcaaaaatgatctgtaaggctactaagagttaaaggtgtttctgccttaaaagcaaatgaaacaactaaaaagtcactgcccagggatttgagtcttttctttccacttctattattgagagagcctccagaagactacagctaagagggctgttattttcctactagaagagcagctgaggaaaggtaaaacagagcgagaatgatcatctatttactgtacaaccgctagtccgccactaagagaagtatgcaaacaagagcctccagaagatggctattccaccagtacatcaattaaccaaatagtgtaatgatacacacaatgtcactgacatgccagtacatcaatcagctacagagtataaaaccatgtgtggtccaaaaggaccctacaataatccccaagaatgctacgtggcacagtagctcatgtctatcagcccaactacttgggaggttgaggcaagaggatcacttgagcccaggagttcaaggytacagtgagccatgatcacaccactgcactccagccaggataataaagacctcatttttttaaaaaaaagtaaaataaaataaaaagatgctcccatgtgacagtcttacaatgcaggctagtgtctccaaagaagacttactgagctacacagaggaagctggacattaggaatcccacccagaaacatttgttaacccttacgaaatcactgattaagtttcaccagattcactgcttcaactttccaggtacccgtatttaggggggaaaaatccattcaccccaaatgaaatgattactggaccaaaattagttaacccaatcagaactacttgagtggccaagccattatcatcctataaagctggaaaggtttttgtatttctcaaaatcttatgactctcatcacaaatgagaccggaagaaatacaacgtttagcatggaagcatttgaactgtaggcacttttgctaacctacactttttttttttttttttttttgagatggagtcttgctctgtcactcaggctggagtgcaatggcgccatcttgtctcgctgcaacctctgcctcccaggttcaagtgattctcccacctcagcctcccragtagctgggactacaggcgcacaccaccacacgcggctaatttttgtattgtatttttcgtagagacggggtttygccgtgctcgccaggctggtctcaaactcccgaccacaggtgatccgcccgcctcggcctcccaaagtgctgggattacaggcgtgagccatggcacccagccttatctacattttatttcatgaaaagagttgtgggaaaatgtgaaggctgccagtccatcattttcttggttactttggatccttctcctttgttgcaagaatcataaatattcccaattcttttacaggcaaaaatgaaacgtgtgcccaaatatgtcctttaaaaataaacattaaacattatgagggaaacaactggcattgtggaaaatgtctgtgcaccctggctaagcaactcactattgcttggattatattaatatacacaccataaagctaaggaagaacttaaatttgagcctctgcatttctgtgctgagtaagctgtagttctttcgacttatcgccttcatacttgcctgtccaaacaaaaagatctcaagaattccactgaaatagtccaaacaagagcytaaacttacaaagctgtttttcagagctcaatagtacaacaacaggaagtagaacttctgggatggggattttgctatttattttttctttcaatggccacttttaagcaaragagaaaaaagtctacaggcattacaaatcctggaagctatgaatcaggaagtgggaaatggctgatcctgaaatggccagcctgaaaatcctggctcttttatgtagtcaagtctctgaagccaggaatttcagaaatcttaggcattttgcattattttctgaatcttaaaagagctgagacttgagagaaaagagaagggccaggataaatgaaccaataaggaagcccccagtctccagctccatgcccctaccaccacacaaatcttgcccctataattacaagctcagttgggacatgctccttacaaatgacgtttgtttacaatgctgctaaggagagggggtgatagcccatggtttctgcagacagagcctgccccaggcttcagctttctcattctttcccaatgttgaatctggaatggactcgggaccctaaatatttcacaactccaaacaccctgcagttgattaaaaacaatggtcacttttgttttcaggaaagactatacctgatttttgctaagtctaagtaaaatgcaaagacccatgcaatgaacctgcatgaatgctttcagacatgcagatttggagggggacactgctctcttttgagcaaatggagatccagtaacagagcggggctcactctgcaatggctgcatttgcatcaacgtgagacaccaaacaaatgcccgcacacaggagtctactatgtggatcgagggaaaagagggcacctttatccttccaaatatgacaactcaatagaaaacttctcattccaaagtcctaagggtccctacaacaggaagctactggagcttgtgaaatatttccagttattttctacagaaattaaacatatcaattctaccggcaggtcatgtgagatgacaggtttaaaaatgtatgttgattgggggagaaaagcaaagaaaaaaaatagaagaaaataaagtcatttcctgtgtcagttgtaatttgggaggcttttttccagtgcccttctaagtaaatctgccataatcaaatgtagtcaaatataactgcaatgtgcaaaagcacagtgatgacctgagaggaaggtgccactaagaacccctgggaccagtcttctatctcttccatcagacatccactactacctccccaaaaaggctcagggttatttcataaacaccagtagcctcccatgtatttaacttagcacaaataagagaaccaatatgtaagggattttttttgctcttaagaaccaaccattcctcttaccccagcctttacagacctggaaaaccatccctgatttgcccccagcctcatcccccactacaacttaaacaaaccttcctctccagccttgcttccagccccaaaatacatttttaaagttctgatgccaagaccaccccatcaagtctagtataatccttctgatcatctaagtaccctcctccaggagacctccaagatccctctgggcaaaatgatctcttcctccaattccagggctctttcccagtgtgctcactccatcctcactcataaaagcatctggttccattccacagctgggcacaccttatcttctcaagagacaatgtaagctctttwtaaaacaggggctgcattttacacacctcacatacctcctgcaggtccccgaacatccaaacactccaaatttgtctctgtctccaaatcctacaaaaccaaattctctctacccagctcagctcagcatccctggggccccgatctacctcatctgcctcctctgctctagagtaaaagcaacaccagtcacccccactctgccgcccactgtagccgaatccaagtggcactctcagcccatgctcttatcagtgcactgggggcaggcctaccatctaccaagcaccagaaatgcccctccgagctttgtgcagcccccttgccaggcagacagcctccagggccaggttcggcacgggaagctagaacacggggctgactgcacagcctggggcagacacacctcagcttccacacccacctgacaaggctgcccagaggatggagggaagtcagtgtttcacccactgccctaatgggaagacagtgtttctcacccactgctcaagcctggaagcaaaaggtcccaatgttcctactcgatgacccgccctgtcatgccctgtccagatatctaaccctcacctttctctgtccatcaagcagtaagaattcatagcagccagcacatatgaccctgagggcaacgttctaacaaagccaaagaaaaggtggcacactggccttcaattcaaagcccagggtggcaagaaaagggtcactagttccctgaaaataactggcatgcaaaattcaaacaggtaattggggtggagttcatggaaaagggaagagaaaacctcacatgggtttgtatacccttcatttaagcacactgtcttcaggcagcagaggtttcaaggtgcatgctaaamacccttgcgcaggtttcagagagcagataaaaggggctaaccaggctctcaggaagcccaatccgcacacgcacggagccgagccagtggaaaccataagcctgtctcatctgtctctaaactgctcacaggatgaacaggaaggcttgatcgatactgattttacagtcataggagtgactcatcacgaaattctacccagcttaaagctcagctgtgaacagaaacaaaacaacataatggcagggtcagatttaaaatagtaagtatgactggtaaacagttaatgctcataaacaattaacaatcaccttcccagcctcctggatttgctgggagaggaaaaagtactactgagggctctgaagcgggctgcagcagtaagtctgtcttctgtggcagccccttccaactcactgatgctggtgtcagctttacaaaaccctggagggtcacgaggagctgcttttaatagaattccacacatctgatgggtacgtgctcactgaggaggggagagaggaggaatgtacttacatggaacagagttttcagagagtgaaatttaagctctcctggagtataacttcctctatgtagctcctgcagagtttaaaataagcaacttatctgtcctaaaatgagagaaatggggtcatataaaatttctcaataattgagttcctctcaaactgcattcactttaaggaaagcactggggtgctcagaaggtgcactacacatttcaggcatttggttacagaggcgaatgtgctcagcgccatcctgaagacatgtactttcaagtactggattccatgtaaattttaatgatctgtaaccaactctcagacctggccaagaacttccatagagaatcctggtctggagatcccttcactatggcacactgctccactgttctgaactgcatgactgtgtcccctccaattcatatactgaagccccaacccccagataccttcagtggtatctgaaggtggggccttagggaggtaatcaggtttagatgaggtcctgagggtagagcccccataatggcaacaatgcccttacataaagaggaagagaccagagccccttgctctctccaccctgtgaggacacatgacatttgtcatctgcaagccaagaaatggacccttaacagaaaccaaatttggtcggcaccttgatctcagacttccagcctccagaactgtgagaaacataagtctgtggttttagccctcagtctatagtaacctgtcacagcagtctgagctaagacatccatacagccccgtaagagaaccaacccagggacgagcaacacctctcatcatctgacaccacctcctgcctgacgaccaggcaaaacaagcacatacacaaacaagcaaaaggggaggatgagagtggtcattcgggtttgctttggaggtccagagaaaatgcaagtccaacttccaggcacagaccagttgcycgcagcaggcttcctcccattggtctcagaccaaggtgagccactcccccgggcgggacagagaaagctcctctggaagccagacaagctcggccacctcgaagtcttctttggaatccagcaggtccaggcctgagccctggcgcctggttaaaccaaargatgacaaccaagcagaaaaaaatagccccagagagtatctgctggagaggcagacaggcggacctggccttcgacacacagcatgcgtgccatggtctctagcagcgcgtccctccaagcttcctggcctgtaaggcgaagcctctagcccttttctacttttaggatgctcagattcttgcctgcagaggtcaatccctttctttcaagggctcccccctctgtaatgaggsagtccatttacaataaaaaaaaaattgagctgtcaaaacaaatgaaaaacttccagtataatcataatcagtgagggaatcaaacatctaaacaaatctctcttctggaaaaataagaaaatgaaaaagcaattacacgtcacatggctgattagcaataaatttcatttgtgactacrgtggcatgagagtttgactcctgacttgctttccttgaaagaaaaaaattatctgcaatactgtctcttgatatagaaaacagacccattccatctgactcagctcaaacctgcgttttttttcaaggcctctcctgacctcacagttcccccgcagtgatcccgtggtacctaggaccgccatggacaaggactggtctccttgaatttgtctccccaactattccacacatatactcgcataaacaattgagaaataagctttttaaaattgtggtaaaatatacacaacaaagaatttaacattttaacccttgttaagtgtatagttcactgacactgattcacaatgttgctcaaccaccgtaaccatccacctctagaacttttacatgttcccaaactgaaactctgtacccattaaacaccaattcctcattgctccctccccccagcctctattcaccgcccctcaccattctactttccgtctctatgaatgtgactactctacatagctcacgtaagggtaacaattatgcactgtttgtcctttcatgactggcttctttcacttcgcagagtgtcttcaaggttcacagacattgtagcacatcatagaatttccttcctttttaaggctcaatgatattccattgtatggatagaccacattttgtttatccacccgtctatggatggacccttgagttgctttcactttttggctattttgaattatttgctgccatgaacatgggtgtacaaatatctgttcgagcccctgctttcacttctttttgggcatataccccaaagtggaattgctggatcatatggcaattctatgatgaatttattgaggaagcaccatatcatcttcctgttaaaaaaaaaaaaggctgtgccattttaacagtctcaccagtaaggcacaagggttccaacatctccacatcctggcctatgcttgctatcatctggtgtttttggtaatagccatactaatgagtatgaagtaccaattgtgggtctgacttacatttcaccaatgactagtgactttcaacatcttttcatgtgcctatttgcctcaagtagtaagttttaaatcaaaagaattaacccctcctcctaagagacctctcatcacagaaagcaaacagtagtatccttacctactagcattgttaaattggttagtctgggctcaaaacacttttgttttccttgcaaataccaccataggcaatattcgcttagcaaagaccattcaagtccatctaccaagttgcctaaacaggactaaccttgaattctggtctcaggaagaccttgtgcgatccagggagcagagcaagagagcagctccttctcgcaccatcctgcatcaggcaacacactgcagctggcttcccacctgactgaagccttctcctgttctggcagccatgggccgctccagctggggatgctcatccttgcaagcagccatccacgcacaaagggcacaggttctcagggttctccacattcaatttaaaataccctaatttgtgttgcagatacttaatctaagtgtttttcagatcctgtgccctaaattttggctggaaacatagtcccactcacatccctcatgctcgtgaccaggctcttccccaggccacatgacccccaattacctccccctccttgaagaaggaagagactgaagggcgaagggacatccacagttcacattgataacgcaaatgatccatcaccatggcctcaaaagggccttggaatccaaatgacccacttactggaggaggatgcttcaaacggaggcagatgcagagtcaggagggagacagggacagaaaaggaggaagctgtgctgctatccccagtggagcgcttgtcaaactctctttacaagaaatgaagctgggttcctgccgggcgcggtggctcacgcctttaatcccagcactttgggaggccgaggtgggcggatcacaaggtcaggagatcaagaccatcctggctaacacggtgaaaccccatctctactaaaaatacaaaaattagtgtggcagcggacgcctgtagtcccagctgctggggaggctgaggcaggagaatggcgtgaacccgggaggtggagcttgcagtgagccaagattgcgccaccacactccagcctggacgacagagcgagattccatccaaaaaaaaaaaaaaaaatgaagctggttcctaattctgcagtcaaaaaaaaacggcaaatgtagctaggagcaaaacatcagaatcaatacacacccaaagggtatttttttttttaaaggaagtaaataacttctaatgcgtatttcctctatccttagcaacaatagtatcagctaactcctagtgtttataaaccctaggttctaagaaatgtgtatgtattcactcatgaagtattggtaacgatccyccaagatgggtgacactttttttttttttttttgacatggagtctcactctcgcccaggctggagtgcagtggcgcgatcttggctcactgcaacctccaacctccaacctccaacctccaacctccacctcccaggttcaagtgattctcctgcctcagcctcctgagtagctgggattacaggtgcatgccactgtgcctggctaatttttatatttttagtagagacagggtttcaccatgttagccaggctggtctcgaactcctgatttcaggtgatccgctcacctcggcctcccaaagtgctgggattacaggcatgagccaccgcactcggcctgatgggtggcattatcttccattttacagatgaggaaaggagagcagagagggtcaataacgtgccccggtacaatgcatcagtagacttctaattctccaaccctcatctcagaggggaatggtgtcakgaaacaagactggggggaaaagggagaaggcctgctttctagtcgagaaaagcggagaccgtctgaaactctacttgctccaacaggtsaacgtgattgaaaattcagaattcactctcctaatagcaggaaagtrttacaaaagcccacaggccaaatgataccaccctcccaggaagtctcttgcagaactgtgttttttaatgttatttgtcaagtgaaaacagttacagtggcagaacaggcagcacccagagagtggcactaatcgtgggctaaggatgggcaattgcttctcatcaagaaccacaatgtgtccagtcaatttacaaacataaatcaacacaagttcaaaagcaccagtagcaaagtccaggcctggatgtgaagctggcacccctctttaaacaaactgttcctcttcacttgcatggtaaggactggaaagagccctgccgcgttggccagctcttcagggtagcgggggccacygccctctcccagcctcgggaagcccaaggccactgcatcagcctggcccagcccagaaccagcctcgggcccagccggcccaactcagaaaaaggcaggggtcagtctccagcctggactcctctaaaaatcagaaagcagtgccccagcaaaygaacaacaacagcgctcacctgaaacagtttcaccttcatttttagaggagaggaacacaataggagggcgtattactccacgggttttaaccctagcccttgatgctaccaggtatccatgatgcccctaataaaggtgacagttcctycacttttctaacatccagctattctttaaaaaagttgaacactgcagtttccggagaactttgctatgtgaattgcctcactgcaggtgtgctctcccctagctctctccattccatgccttaaaagtgccaggtgtctcctcgggagctgccctgtgctaccgcccccagtcctgcagccaacctgttttgcgggtcctgcctctccatcaactgggactgctctctcgacaaaccaccccagcccacagctcctctggcaacccagcccctcacaccgaggacccatctcaccagtcacctccctcagstgggccaacctgtccagtccattcctgcttcctggtctcaggtctagagacaagacttccctccctgagcctgtcctcactgcctccctcatctataccatcactggctcacaccggggtgtctatctgtcccccaatcctgactccatcgagagaccagagcagcctccccagaacacccttctcagcgggtccactgcaatggtgcaaaggtttcagcrctcctcattctctagccagcagtcaattccttcccaccacacaaacaccggattctgacaccctctccactccatcagtgcacactgccacccacaccacacatggtcccttcctctcctggggagctgcctccttggatcttgagagtcaaatatttagggcacactaaagtcagacatcctccttaaagcttctcaagccattctgcagttccgtgaccccactgcctgcagcccacatacttctctccggtcagcatcccataacttagcactaaactcatagcatctgttactctccaccagtagttgagttttcccaactagacaacaagctcgagtaaaaaaaaaaaatcatattctttcatatgctttccatggagcagagaccactggaggccctcaaataatctagatatcagaaacagggttccatactctgtcaccactcaccttccactcccactccccttccacagatagggacatgaccttgaaccagtcagcctggttaacctaaaaacccattctcttcaggcacagagaagcaaggtggttacttagtggtttcaacaactgacctgagactcagacgtccgggttcaaacctttcactgtagatgtgcaaaaaaagaccctccttggccagccacagtggctcacatctgtaatcccagcactatgggaggccgaggtcggtggattgcttgaggccaggagtttgagaccagcctgaccaacatgcctaaaccccgtctctactagaaaaaaaaaaaattagccaggcgtggtggcacacgcctgtaatcccagcttcttgggaagctgatccacaagaattgtttgaacctgggaggaagaggttgcagtaaggcagaggttgcagtgagcggagattgcaccactgcactccagcctgggcaacagagcaagactgtctcaaaaaaaaaaaaaaaaaaaaagggccytattcaactggcagcaattccccagtgttgtggggaaggaggactggaggccccagagagagcccaccagggccacccaccatgaggaggagaaaaaaagagaaaagcatccatttattggatgctttctatttgccaggtttgctgggcagcttggatacattatctattgctaattctcattggcatccctgctagagcagtgttattccaatcacaggcagagacactgaggcctggagctccctttccaacatgcctccatgcgtgggagagagggagacagtgaattgtttgaggggacaaggcttcaaaggaagccctgcacatatgcaaaccgcacggagaagagcagagcaaagacaggccaggctgtccagctaagttcacatccagccggttcagcattcacatgagaatttcacaagatgcttttttacaagctactcttgaatattaacattccagcttcaaatgattatgtttacattnnnnnnnnnnnnnnnnnnnnccaccccactcctcggaagaggagactttaaggataatttctaaggtgttcattaagttcaggagtccccttgacaccaacctagacaagtaagctttcttctgtccagaggtcgggagctggcctcaccgtcgccctaccaggacactgtcaaaggccttcaccagcaaccaaaaccggcagggttggrgagggtgcttcaatgatagagagacctgtaagaccttgctactgtccctcccaggagtgaggcaaaagcttactggcctcaccaagaaaacaatgcaaaaaatagaagccaacttccatacgtggtgattctgcttgttccaaccacatctccctcaaatctccatctctctctctgcctagtatcttgagatctgaaggctggaagggcctgtgaaatgacctaggtccaccctgtaactcaaggtcagcaggtgtgcaagyaccctacccacccaactttctgagatgccaccctggccctctgcaccaggccactccggagaccaccaggcagccgagtccagcctgcagatgcttcctcctcaggaacccagctccargagggtttaaaagcacactacagacataaatcggtgccaatgaattattcattacatcttatctatagggaacttatggaacaaagtctccatcyacagggatgaggtgatcttgacacaaggccagactcacaaattacccttccaggagttctaattttttttattcacctcaatgtgcaaaaagcctaatcaaacaatgattttaaagawaattttattgctttcaagttccatgcagcagtaactggtgtgataaaatgttttggctagcagaggtgcaatgatcagatgaaaataaatttgttgtacaaagaagtgcttcaaagtgaatggcgagtatccctttaagaagtcttccgtttcttcagctcctcctatgcaccaggcactgggccacctcctgggaattcaaagataaccaaggtaccattcccctccccaatggtgggggaaagcaatatgggggagatgcccaaataggaggtatagcaagagaccacaggagctcaagtcagtgcaatcattctgcatgcagaatcaaggccagagagagggtgaaattacagctaactcttaaaggagcttgccagagggcaagctgrtagtattgtttgctattccaagcagaggggcttccacctgccaagacaaaragacacgaatgagtacagcctgaactgttcaaaatgtctgggaggaagggaggctgaagttctctctcagacagccaaacaaagatttccgaattaaaaataataaaaggcaatcatggggaaacaggtttaaggcttttgacacgtaaaactgaataaccagctatatattttgtgtaatctcagcaagaaagattctgaaaatatcaataaaacatgaaacaaaatacataaaattagctagcgaaatatagacggtgtgggacctaacacaacactggatgtatttattcttattctctgtgagtatttctggctggcgagcatcttaaccacatagaatagccaaaggggagagagaagagaatgaaagtgttactacctgtttaaatagagcaatggaaggtaaatcttgctgtatttttccaaatgaaatcagtagtgtttttttaatctctaatctcaaatattttggagctttaaatttattaaagtcctgtaaaattatcttaaaactctaactgtaaaagacacactaggtgttaacagctctgccatggagttgcagtrcgcctgtctgcatcacttaggaagaccctaattctctcaggacagctcgcactgacacagtagagtaaccttaatccaaaactgtagcccagtgatttctacagaagtctgtagtatccacattttcttgcaatcagtccccaggaagcaagccagagagtgggttgggatcgctatcttcctccttggggcactattaattcagtcacctaatatgctgaatttcccttctggccactagatggagcctatgcataggcgagatgggcaaagtgcacactggacacctctcaggtgtgagcagaaattgacaaatgacaatattaagggagaaagtgtaataaacagatctctgaaatggaaggcaaactgcagggggatgaccatcgtttactgaaaaaaaaaatcacaactgtttaataagcaacatgccatcttgttaataaacaccttagcaaaataaagttttattatacatttattgagcacctatgtgccaggttctataacatatttaaatggcaaggacaatcaaacatcaagtaagccttatatttctatccaaagaacatctctgttcgaggatgtcacaaccctaagaacagtagcagttgaagtccaagggcttaataccaggtgccaggttctattctaggcacttgacatgtgtacgaatttgatttctatgaatgtttaaagtagattctattaaaattataatttcacagatgaggaaactgaggcacaagaagattaaattatttgcctgagagcttagctastgaagagctgagattcaaaccagccactttggctccatggtcctaataaaattacaagcaaggaacaagacaaatcactgtcaaccagcaaaaccgtgggttatgaactcaaaaggagtaatgggaaagtagatctatacaagttagggaaatcccaaaaaccttcaagaaggaagaggaatttgacttggaaatgtaaagatggcatctctgacctattcaaaccacagaaaaggcatatgggggaaaggaatcacctgacttagcgtgctgccttttgaaagttatgatcttgtccctattttacagatccacctggaacttggaaattatttcaatttaaaaaacctattctatttcctcacaatttttctgactttggttttctaaacctgttagaaaaggttttcattctgttgtttagtgagaaaaggagaaatgtctcccccaaatatttttaagtctccgcatttctatcaagactcagaaaagttaataactttaggaccaaagaactaattggcagctaaggagaaactaaagctatggtgaccttcctgtgttcttaagcggcactttctgctattcagtattgaggatggaaggagaagtagcagagtagtgaagaggaaaaacattctcagctatggaaacagcagaagcaaaaacttgaagacaggcataacacagcttcctttccatcaagctaatgcacagatgctggggagtaccaggaactaacagtggatccctacagcacaggattactaaggacctgtttcattacttgattctaaggaccctggacttgatcctaggaccacaagaggcacgttctgagtatttggagctggcaagtccatcagactaagggaatggtacaggaactggttcagaggccaactcagcatgtagtcagagtcaatgcaggtctgcactggaccaggctggatcccggaataggggtcaatctgagcgatttcaagtgactcagtgagatcgaaaggcaacattcaattaatgagtctccccagaaaaggacaggctgcagaactgaaactgaacaaattccatcctgagccaatctctgttgctgaaaattttactgaggtgcatgtgagaaagaaaatcccaattgtatcacctgacgaagaaaggctaccataacaaaagttctgtacctacgactacacgatatcatgttgtgacctaacatatgcagtgaactcattatccacagaaatcagacaacagaactaagggaagcctcacagcagatctccctctgctgctactggtctctgtgttcatttgttttcgtggcaatctgtgcttctctttaaagtcctgagtctgtaagcttgtgtattatcccactaaaatgagactcagggaaattaggtaaagagaataaatacaggacaacacagataaatgtggacacaactgagagggattttacaatctagacagaattaatagctaatgacttagaaaacactttgtaagctgatgcagtcaattggatcatgggctcctacctggaatttctctccatgcttcctactttttccaggaagttatcaaaggtcactaagacgctttgaatttggggaaaactcctayaaataaattcatctctccctaattaccattagacttctgttctttaaagttctattgactaaactttggctgacttaaattggtgatgtctcatttacgtaatcaagcacatattcccaataaccaactttacagagactaaccacgactatattttttacagcagaggacaagctgaaagcaatcacaatgtatcaggaaaaatttcaagttatgctctataaaatatttatgctctaacaactatcaaaatatatttgttctcccatgtcaagagtaatttttaaagtggtatttatttttaaactgacaaataattccaaagccagtttgagaaagctagtgccatgttaaaaagaaaatggttgaacaaaagtatacaaaacagcaacaacaatgtatttcaaactygcagaatttggacgatggacggatggatggagatacacaattctgaacaaacggcattcgtattatgtaactcttactgaagtagagacctatggtattaagggggctaagactgaggagtgagataaaacaaagtttcaaactcctccccgcaagaactttctggattagcaagactactttctaaagtctttaaaatatgcaaaaaaacaaaaaaaaaatgttttccagactattaccaggtgagcaatttatttttatatatgtattttgtgtgtgtgatggagtctcgctctgtcacccaggctggagtgcagtggcatcatcttggctcactgcaacctctgcctcctgggtttcagcaattctcctgcctcagcctctcacgtagctgggattataggcacgggccaccacgcccggttaattctggtatttttagtagaaagggggtgcaccatgttggccaggctggtcttgaacttctgacctcaagtgatctgcccaccttggcctcccaaagtgctggggttacaggcaggagccgctgtgcccagccaggtgagcagtaaggtaggcccagctatcgctgcagtgtgtgatggccccatccacaggtgtgcacatcttccccatgtgactagccagccgccccactactccaaagaatgtgaatgcttcaagaccaccaaccaccaagtgagctccatggacacaaggcccaacaacttatattgcaatcgtaggtgttcatccctcaccataaaagaaactactttctgttgtggtccagtgaaaacagaagagcaatctatgagtttacaaattcttgtaggctgggggyggtggctcgcacctgtgatcccagccctccgggaggccgaggtgagtggatcgcttgagtccaacctgagcaacatagcaaaacctcgtctgtactaaaaatacaaaaaattagccaggcatggtggtgtgtgcctgtagtcccacctacttgggaggatcactggagcctgggaggtcaaggcagaatcaagccgtgatcacaccactgcattccagcctaggtgaccagagaccctgtctcaaaaaaaaaaaagaaaaaaaaatctgtagtccagggcaggaaaaagaaaaattttaagcttgcttactagtttgtttcgttttatttttttttttaataaacatggcagtaacatctatagtttgacgggtatctttaaaaacttatggtaagacattttacagtatcaaataatttctaaacctaaagaactgcatccagtaagtactcaacatgtatttactgtggaagaaaagagggagggaaaacgactatttctcagttcaagtaaggaaatatcagtttttccttaagatttgaaaataaaacataagtaaagccggcatcagtggaaaaaaagggagagaaatcttcaaaaatggtatctgggactttcaaacgagtaaaattgaccatttaaaaacttagtcttcaaaagtccaaaagtctcaaaatcaaaggtattgttaatactttgagtcaaataaaaccaaagcaatttaacaaaagaaaacatcatgccgaggaagtatgcttctcttgagataacaatctaacttgtttwaaagatcctttgtttactaaccattttatattccaaatatatgttccttcctcagaacaaatcaattcttttccagaccctcggggatgggggtgcaggcatgaggggatgtgtacatatatcaaagttttaatcttttcaaatagtggaactcagttatgcttcccaaatgtcaacaggtctcaatgtccacaaacactggggctgctaccctcccccatccccacttaaagccacatcacatctttacaaataactggaaaacctcctcttgctaagctgatgccaaacaccattttccaggagggatcagagtgcatcactcattaggcactttgttgtctctaaagtgttcagaattttccttcagaacatctcagactggaaatcaagaaactatatccgtaacatgtgtgcaactattatatatttagtacaattgagaagagctcatcccctggactcagcacctgtcctaagctggctaagaaaagcagttcaaatcaagttcgcccacaggcgcaaatacctcttccatgaactaggtctgatttttaaatgagttttgaaaacaaattggggaaaatcacaacctataaagaaatgtatcttgtatgctttacaattaaaaaacaaaaactttcaggatttgtctcctcactcttactccctcacgcttttaaaaacaccaagttatttacaaattataaaatgccctgaaattatgaatgcttcctgatttctagaaagctaactaagcaatatgtaatccagaaaacttctgaaataagttccatctttcttacaactcaaaacatgctatgcaacgttcatgtacacacctgtgactcctaatttttggaaaaaggcaactacaacactgcagtttgtaaatcacaattgccatatccaatgttataaagaagacagtgccgccagtcaagatgggttaacatcacctgtatgtcacagtctacagtgacatcccaatataacggaaagcaccaatgaggcaaaaaaggtatagggtaaaggcttctgatgaacaacactagagtcctaagtctacagaaatatttttaaaagaacctttaaaatgctaactactgtctacttgaaaactgcaccctatactgagtctgaaaaaaaatctgaatttcaagaaaggtggtttcatgcaagactctgcaggttcatgcactgagtagcacaaggtcagctttcatacagtaggtgcacaataagtgcaggctggattcagttgcttcttacagcacattcttacaaaacaaatgaaaccagatttaaaaggaaaccaccgtcccttgagggttcctcttggcaaaaactctaaggcaacaagtgaaaatgatacagttgattttcattactgccctgatcttgcaacaataggaagggcaggaaacatttttattagtaaactaagccttagacaaagaccaaaagcaaatgtaaacaacaattattctctaggtcttttcctattgaaaggccagggtaaatctggataaatgcacacagtttcaaaacaaaaatgcctttgccacattttaaaacctttcgttctgtaaggaattttaattttataaaaatcactgtatacttgaaacagtgtatcctaaaactactgcatcctaaagattctttctcctgctcagaccctggaactatgtaagaaataaaataaaactgcaaagaaaagaaacaacaatactgcattaaaatgaactgttctgttcatcctcagtccttactaccacttgtggtcaatgtggcatatcaaaaaatgagtgtttaaaacatcttaaaacagcaatgtctttctttgttggaaaacataataaaactggaaatacaaacagcccttcagactcagctcctaaactctatcctgaaaaaaaccatcatttcagattcagctgaggtttctattgtcaaaaatctgccctccaccagcatttgtgttttttaaatccagctcctcaatccctaactgaagctacatagaaccaagattctttttctcctgcttgcccatttctactgcgggattgaatccctgttgctaagcttcaattatcagtttgttgtattgctgcaactcacggatctgaaaaactcataaatgaaaagagagagagacatcagcctgtcaaatrtatgtaataattttaacgtaatttaaggtagcataacaagttattttcaacctgatcacatttctttaaaaaaaaaaaaaaagggtttattgagatataattcacataccattaaagtccccgatttaaagtayataatccaatggttttaagtatatttagagctatgcagccatcgccacaaactaattttagaacaattttcatcaccccaaaaagaaaccctgtgcccacyagcagtcactccccattccatccgcccccagcccctggcaaccactcatctaccttctgcctctatggatttgtttattytagacatttcacataaaccggatcatacgatatgtggtcttttgtgactgacttctttcactttttgtgatatttttaagcttcatctattcaaccttagcatatttcttagagttgaacttttctaatctttttcgacaaatcaaacattatgaccttttacatttcaaatcctgacacaaaccccacccttccacaaaacaccatttgcttgctatgtctctccagaggatctaaactataatttgctgtttaggttctttcagaagttctttttctgggttctccttctggtaataaaacactaacttctttaaacaccaacatttcacatacctacatttctgtgacaacaggatgcctggggtagaaagatgactgaatccttttaaggagatgggtacaataaatttaaagtgcatgctgactttttaaaaacaaaatagccctcagattatctggctatcactcagaacctccgaaccgccttcatttagatgctctgttcacattatggtgatacaaaacaaacacatccatatgactgcctctgcttcagaaactaagttttctaagataaacaacactctttctactgccatcacactcaaagaggaaactctaatctctcaatacgccagcaaaatacctgcaactgaaccaacaccctgtctttwtttctycaccagacaacagctgaaagaacgccctccctgatagggctcagcagcttatttctatcagagttaagtggtctagcaccttcccsgctaaaaactgaacgcccgttcacaggcatagcttttaattctccacatttcagagatggagggaggggcaggtactgagtcagtcaagacttcagcaaaccataatcgagatttggggtgccttctgaccacccatcaggtttccaggaactaaccactgtaaagggatcctggggggaagctttggtatcatggagtaaaaacatacattaaaacaccccctccctyctgcctgtgttctcaaaaatcgccgtcttgcacaaasaatatccttcaagaagaacgctccaaaagaaaaacagcctattttaaaatgcccgactcctgcgtcggcgaaggccatccctrctgttttgaatttcagaacattaaaaacacaaaactagagaagctatacagttcaactgcataacataacaaaatggattatttctcccgtgtcttctaaaccgtacttatcttttaaagataaaaaccctyctttgtccccccagccaccacctaaacgacttagtaaagggagccggaaggctttcgcccaatcgagtccgctgaaagtttagaaaacaaagagcaggagagcccagatctgtggaaggtccggccccagtccgcgtcccactcggcagtaaacacgcgaaccacgatmtgctctcgttccgtcgcggactcatttcttaccagacgtttaaggatttgtttatagaaacagcctttctgaattgccccggtgatggggccatacaacctccgctgcctcctccttccccgcctcactcgtgaaggctcagtcgtgattttttcaaagttaatcggcaccacctgcataccctcggcaaccattactcaccaacacgccctcaccgttcccagtcccagttctgcgacatttaaacttttaatcgtgttcaaattaccctaccatcttgaatgtaccagtaagccacactttcaactttttcagaagaataaaacccccacctcctccggccgtagacaccggggggagttctcgctccccgcatccccgcgcttccctactaacccccacccgacaccaccaaaacaaaagctatcagattgcaaaagacagcgaatgtggagcgacactgcttattaactacgtacaaaggaagtgcggggcggcagaagagagggcgacacgacgccgaccacaacaaaaccaaggccagggctccgcgctcgcaaaacacaacaccctccccgcgccgccgcagaccctggcgctgaaaccacagcgtacgacacctctcgccagggacgggcgtctaggtgtccccgtgaggcggcgactacaccccgcgctgcgagcacgtgtgtcggaatgcacgtcggctccgaccacacacccaccaacgcacactcggatgcggccctagtacccctccatcccccggcccgggagaaactgggagaccatcccagagccctctgaactggggacccagtggcgctccccggaagagacaagctgaggaagactcccggcctcgcacttcccggggggctgcccagagagcgcttcccctcaccccaccgcccagcccygggacgccgggggcaggtaacccaacgaggagcgggccaaagtgacgggcaaggccaggaacccgaggagcccgaggggcaaaagcacgttgggcgacgggaggcagcgacgggcgcttggagacgtgtcctggggcttcggggcctctccgcagggcacctsccccctcgagggcaactcgcaccccgcgggccgggcggctgcccgctccccactgcccggtcagccccagcagcggagacgcggtgcggcccagggtgctgtcgctgctgcctgcgcgccgcagggggatcagcgctgtgtgcggagaggctcktgcgcayggaaggggcgaggtgcgggtcgcggggcccgggaaccgcggagcccgccccggcaccaacttccctaccgagtcctcgcgcctagccgggaaacacggctgggctgtcaggacggagaaagagaaaagcccttcccgcgcggggatgcgcggagccagggcccgcggggctccagacgaacgagcccgggtcccgggtccgctgcagcctccctcccggcagagccgccctgcgccccaccccgccgctcccgagcccgggggcccgacagctgcgacggtggcaactcgggtttcgcaaacagggcgcagcccctcggaggaaaagttcccgcagtggccgcgggcggcgggcacatactcactttctccactcgtcggccagagcgagagcgcggcggagagaaacaggagcccccacagcgaggtcggggaccctcctccggagccagacttcattccttttatttgggatgaaattcccctttctcaaaaaaaaaaaaaaaagaaaagaaaagaaaaaaaggaaatgaaaggaaacaagtctcaaactcagtcttcgctccccctccaaaaacaagggcgaaggaaacaatactccgaaggcggcgccgccggggccctccgggtgcgcggacggggcgggcggcgcggggcggcccctcagcgccggcagcagcggcccagggctcggcggagtcgggaacccgaggcgcgccggggcggactgtcggcgtcgtcggcctccattttcaaacccggagaggcaggaagggggraaaactgcaaagaaagggggcaaagcccaaatctgcctaggcgaggaaaaacaagcccggccctggccgcgcgggaggcggccggacgcccgagcttccgccgcgggagggcgcgacgcagttcgcaagatcgccccgaagtccgggtcacaggcgaggccggcgaggggcagaaacgcggagtcaaaatgaatgagcggctccccctcctcctcctcctcctcctggctccgctcgccgccgcctcctccctcagcgccgccgccgccgcggcgagctccttcccaaatccaggacacacacaaagcggcgggccggccgcgccgcgctcagcactcccgccgcgccgcccggctctgcgccgccgcccgccccgcgccggcccccgcccggcccccgcccgccgccgcctgctctgcgcgggggctccggctcgctgaaggtcacagccgaggcgaggcgcgccgtggagctgcccccgcgcgggaggggcgtggagggcgcggggggatccggggagcggggccgagggtctgcgagcgccggccgtgggcaggctcgctggcggcgtccctctcgctctcccgcctctctcgagttcgcctggtgcgctcgctcctcctcgggttttttccctttttttttccgctcagcggagttaatgctggtaaacaagagccccagcctcgccgcgccgccgccgccgctgccacacactgggggctcgcgcgcgcgcgcgcgcgccctggcccgcgcacacgcgcccgctcgcacactcgagcggccaccgccgcagcagcggcgcgccgagggcccggcccaggccggcgcgcgcaaaaaaccggagcccgggttccccaagacgtgcggagcggagcccgggcgtggggcgcgagactgcgaggcgccgccccccatctcccgccccaccgcctcccgcgcgcacacagagacacgcgcgcgtgcccacccgctcccgcccccaccgcactgcgccggccaccccgcacgcgccctcccctcccgcccgactccaaaaacaatgcccccgccgccggtccggtctcggcggggcaggggtgggtagccagggaaaggctaggcaggggaggggtgggcaggagaggggaggggtgggcggggagtgcggggctgggagaggttcattgaaaacaacaacagcgcggctggaaagcgcgtttccccggttcttgaaaagcttcattgtttmttgcagctgttgcaaaataaataaatgcgtgcatgcggcatttttttcgctgcgtactggaaagcccgaacgtggcggaaggggcgcacctgggagaaaggggacccccccccccaggctactacgccgggcactttcacgccaggctggggtgcccgcggcgttgcgaccgtggagcccggagtttgggggctcagggggagcggagggggaagggcgcggcccgtgtggctcggcccagagtggctcgaggagagaggaccccgccgcccctcgcgggccccgcgccccggaaggggggcccagacaggcagcgccgcgtgccccgggcgcgtccccgcggcggccgccagagggcgcggcgggcgctggggagggcagcccgcggagagtcgcctccctccctccgggggaggaaatgtgggggcccgggctgggggccgactcggctgggtcgcgctggcgtggcctcccggaccagccgcccgccctgagcgctctccgcggcctcgcgcagctcagggctccaccacgtgggcggctgcggggagcggccggggcgcgtgcacgctgcgggtctccgaagctcggggggcgtgtccgggtcccggggcgccgaggagggggtggaggctggggccgggaagcctcccttggcygcggtcccgacccgggaacacgccgcatgcactcgggatcagcggctactgcggaaacccacccgcacctgtctcgggtcctcccaggcacgttcctcttgcttcgtttgctacgtaagtgactggaaaccagtaccgaccctaagtctccgcggttgttttcttgaatgtgcaggagsagaggtttccccaaagcgagactcccctaggactgccatctaatgaataaatgctgcggagaccaggtcctcaaagagggaaacagcycagcagtggcaggagagaggagtttgaaatacgtggacttttacaaacagtgattggaccrtgtgtcgcccttaatgtggtccggtttcatgactcaggctaattgatgccagtaataaatttttttaagatagctaataaaagagttgtgaattgtcgagataagaagtggttgtctcaaacaatcgggtaggatggtaagaagggacctgatgtaaaggaaggtagtaggtttcttttactctctaattctaaaatacttctgcattagaacgtgtatccatcgttcgtaaataattttttaagagctgaaaacaagtcaaaagctatcataacggaaacttagccctttttttctaaagttgtttcctagatcattttcctccttggaaatttctagctcaattcagagtcagttgtatagaaagaaaataaaccttgttttacctaagaaagttattcatatgatgggatggttttgtttaactgaaattcagcttgatttttaaataaagagtttcagttttggatgttcctagatttaacagtgaaataaatttattagaatcttaaaatgtattatttaaaaattaggcactacacatgaagaattaaagtccagtctactaatttttaaatatttcttaagttctctgcatgaggttggtcttgattcctgcagatccactctggarttaaatgcaaaggaatattgatatataatttcattatacttgatttcagaatttttaatacatacttgtaagacaaaaatttagagctgatttttaaaaggctagtgctaatataaaatcttcaaatactacccaatgtatttttagtattagtaataaatatgcctgtttatttgtccccaagaacataaagaggtctatagaatttttaaatgtatataggttgttgtaggggttgtaggatttgtttttgtgtgttttttttttactaaaatgatttttatttgtgaattttttaaatgtttgtgttttcctgaagtagtaggaaatcaatcgtattaagttattttaaacagtgaagtgggagatgtatcattatatagcttaatatttagggaaaaaaaaggaacaaaaatttaggttgtctttacgctctaacttgaccacatggacaaaggaggtgatttgtatttcttcaatgattatattttacatacacaagtcaaacttattttttcaaccttgaaataaaatcatgtagacaaaaattaattggagtctttgctttatacccacattgacaatgcaccaaactttttattttataccattttactcaggtatcttataggttctccctcttttggagcagaaactgattgcttgttttcattttttaaaaacgccgtttacttgataacagtttcatctcaaattattctgctaaatgtaccagactccccaaaaaatgtaatgtatatcatatacatcaagtgcaaacgtgagaaacagcacaacaattgacaagtatcaagtaatacagtatattgtgatgtattcgcagaarggaatgttagcagcaaaagtgaataaactacagccccacacaacatgggcagatctttgaaacacactgagtaaaaatatacaaatatcaaaaacgcacacagcgtaacaccattttgataaagctcttaaaaagcaaggaaaactttaaaagttacagaaaattttttttgctttaaataataaaataatatttttcctttgttttgcttttgttttagcaaaagaattaatgaaggatgtgaattcctttggagaggatgagaagcccatagscacatgggtttccattgtaatttggaaatgagttcactcttggattgagtgacggatttacaaatttccattttataagtatgcttaataactaacacatgttctacatatttttgtatgtataaaacattaaagaagataaataaaaatatgggagagatccatgaaagagatcattctggttttccaatgggagtcgttcagatttcgagctgtccgtataaataactcagaagcattaaagatctactaaaataacacagttaatcaaggtctgatccttaagatatttcagaagaatgtccacacatctaatatcgatgcaatttaagacaaaaatcaaaagacaaaaaatttaaaagacctcacttcacaggtaataagcttcattaagagtgcattatgtcaactgtttgacagtttcttataaggtaaaacatacaactaacttacgatccagcaagtctagccctagttatttacccaaaagaaatgaaaattccacaaaaatacttctatgggaatgtcaataggtgctttgttcataatagcaaaaactaaaacaacccaaatgtaaatcaaaaggagaatggataaacaaatcatgatatatccattcaatgcaatactgcttagcagtaaaaaggaatggactactaatccatgcaaaaacataaatgagtctccaaagcataatgtataagccaaaagagtacatactgtattagctcatttatgtaaagctcaaaaacaggcaagattgatctagagctagaaatcagaatcatggctgccctgggtgggtagagagggaaagtttcaaatgactagggagaggcataaagaactttcttgggtgatggcaatgctctatatcttgatggggtgttggctatgctagtatatgcatttagcagaaacacatcagactgtacacttaagatgggtgcacttcattctgcataattgtatctgaatgttaaattgttaagattgtattataatttagatagttgcagctgttctaaaaaaaatgttagcacaatgcttcccgtttttactattaggtgagttagtagagatgctaaactccaacatccttgcccacagctgtctacagatgtgtatactttcagtgtgtatctgcctaaggtctttccttaggggcattagctgtggaaggcatcacatggtctccacagagcaccccaagggcaggaaaaatacaagtgatgctgtagctgattcctatccccacacagccacaagcaacaagagtctcagtcttgttgaggatctgtttatactcaacttga

SEQ ID NO: 9866 - DNA, 22069 bp, Homo sapiens
ggaagtgaagcaacagaaagagatcccacgctttcagcatccagttcagtgccctatctactaaaacgttgaagcagaactgaagtcaaatcaagcttggactaacataagttatgtttcacccatttgtaaatgtgcacacacttgaggtacacagcttccaagtggaatgggaaaaaaaattactctattcctttttaaatgctttcaagcatggtatgtattatgacttgaaggctaaaactaatcayatccttcacgttggcataaatagtatactcaatatgtatactcaaatgtatactcaatagtatactcaaaatgttctcrtattagggcagccttaccctaatattatgtattaggacgatagcagagtacccaggaaatattaaaaacatacactgagtttgtagaaagggtcacatggcttaagggaaaaaaccccagatttaaggcaaagtatgtgtatctcaaaaacaagcactgaaaaacttcaatgacattctcccaattccaaacttaaaaaacgagattatttttagtatctttcataatagatgaaaatttacagtgagaagtatttaatactcttcgcttaaatgttcatctaaagatctggggacatcaatttctggaatttttaactcgggaaatttgtcaaaggctcccaagaatgctaacactgagaccaatctacgcagggtctcaactttactacatacagtaaacccaactgtactgaatcaaaggccagtaaatttggcatgagactactctaaaagaaattattttacaaagcaaacaatgttcagattgccccagaagcactaaggtataagaccataatctcaaacatttaaagcaaaaacatgagcctagtcttttataatcagacaggcaacaacctacagcaggattcacagaattcccaaatgggaagaatcacacttgggctcattatacactaaccattaacaggacaatatctactgtcctgttattaaagaagcattgctggactttggctaagtgaatggggggacttttttgcttcctacccaatccaatgcaggaaagtctatgtacctaccttgtaaaactatctcaaagttaacacaacattgtagtttccattgatttttaaactttaaaaactstgccctcagagagcttgctacatggcatgtatatkttgccagacactaaataattttaaagtacctaccccaaatgaactgcagcactgcagagaacagaatgggtccacaccacaaagtaaaatgagaaattccaatgcttataagtaaaaactacggatgttaatgtgggaaagagtaaatcaaagtgaactcaggagggcatactatggaaataattacttattctaaagtcccatagtaaactgtagaaacatccactagaggtgtaacaggcatgccttcctaaaaatagctgtccattcttacatgcaaaaggaaaaaaacctatttctaaaaccaactgatttttaaagtattttaggatgaaactgtaatcactttattctcagatttgcagaaggaaatgcacacagaactgtgtttaataaattcaatttggatactctattaaccagtcttaccctcaatattgagactataaaactgttgcccttataatatccctcaaaatgggagaaagaggaagggacagatacggtggggagtgcagacaccaaaaaaaaaaaaagagagagaaaaaagtctgaaagtttttcattcaaaaagaaagccttaacgtctggaacaggatagggctgcataattggaaagttaagaaaagtcaaatattagagcccttaaaaatgagaacattatttttaagtgtaattttaaaatcaacctggstaggccgggcgcagtggctcacgcctgtgattacagcacttggggaggccgaggcaggcggatcacctgaggtcgggagttcgagaccagcctgaccaacatgaagaaaccctgtctctactaaaaatacaaaattagccaggcatggtggaatatgcctgtaatcccaactactttggaggctgaggcaggagaattgcttgaacctgggaggtggaggttgcgctgagccaagatcacaccactgcactccagcctgggcaacaaaagctaaactccgtctcaaaaataaaataaacctgggtaaaattttattttcagtaaatgacagttggttactatctagaatgtttattaactatgaatataaacatttctccatttttcctgagattattcaaaaaagttgtaatattacatcgttttaggtagcaggtcaagtgtaattacttcgaagagtcaaaacactgaccttcaaatttaagtttatggtcatttcaaatcactggaaacaattacatgagactcaaaatacataatggagtaatgtcaaatagtttatagtttaatcttaatttgccactattagctagcagtgaaattgagctgctagtgcccaccactcaccmaatacagggaataacattcatcgaaactgtgaccccagtctttttttttcctcttttttgcttttccccttgcctgtttcccatctgctttttctccaaggtaaagctggactgatttcagtggatgagaatacagtgataagcaaatctttaaatgttaccctaaataggctcttaaaatagaatgtagcttgkaaagatataagttaactgcctgcaagttagtggccttctactctccagtggtggtgtatamacccctgaaaattcaaatataatcctaaaagcagraagactgacatttaggggaggggaaaggatggataaaaagaacaatactcaacctaccagcytccaaagagaagtcatgcaattgtgaatacatgtcaaccaactgttattaatattccagccaaatcacactgaaaataaaaaatctggtaagagctgtagtggaaagccacattagcccaccttttaatggtatatatayayayacacacacacacacacacacacacacacacwtyttattaaaggtctatttacaaatatgctaggtaaaagacaaacatttttccataatacacagtgctgcttaaagaactgcttcagacatctccagaatatttcagtataacatgcatgacattttaaacacaatattttatatcaaggagtcttcatatttagccattaaacttaaattccaacaaaaatatttttcatcttaaaataaatcaaatgtgaagattmcggtaatattttttcttgctcgatataaaaatatcgttactaattgtttagcttaaattgccaaactgcaactacatgcattaccacagaccaaataccatgtaacggcatcaattttgcccaaagattacacatgatgcctataaaaggtatatatcccaggtacaaacctactgtatgtactatggtctagaatttcctggggatcaatgggcaactaaccaatacacagcctctacatattatgactactgaaacctttataatacagaaataaaatttaaaagwtttaccattcttcccgctgtgccgtcgctgcttcagagtgtcgtggggaggagtttgaatggctagggaattaacaaccggtacagcaaccaatcaaaattctagttttagtttttgacactgttagggttaaaaactttaattcatttacacttcaacagtaggtaactataaagtcagctgctttgcgatttgaattatcagggctaacagaaagcctgccccaaacaggaagttatacaattaatcattttggtgcctctgtccaaagaacagaattcagcaaacgaaaaccaaaatgttaaaggttttaagtttccaaatatctaacatcttcctttctcaaataagctatatwcaattcgagttggttctgtttaatttttaaaagtttgcttcccttcccaccaccactcccccaaaaccagcactatcatcaaacagcctgacaagaatctgcctargctgggcttaataaaccctatattccaaagtgcttctcccctcccaactttccctccaaatcctgggctctttctcagtaaargaaatcgtgttttctaatactagattaaagcgacatcttgttatatccaccaacacctttctctttacagttaaaaaaaaattcagacacacacacacccctccccattacaaaaaggaatggaagcgtgaacccacgatcatcggtcagtaatcggagctaagaaaactcaaccaagaaacytgatttagtccctcctgctaactcccgtattatgttcccaatcccaaatgctgcattttaatacactaaatgcagatttaggtagtatatacaactgttatttcaattggaggaagcaagttaatactaagaaatttgcaycaaaaagaaaaaaaaagtatcccatagcacaatacaggatttgtttctcttaagaggactacaggcctcccttagtgggcgggaaacagatatcaagacaccaaaataggatcctgggcaccgggaaaaaaagggggctgggggttgtaaaaaattaggttgcacataaaaagtaaggtacaatctgtactaacagttggggaacccaatagctgagggcgcgaaaagggtgcgcggttagaataactcagtggggtgggggaagggtagatgctaggccggagataggaacagctccagtcaagtgcaggcccgatcgactaagaacttaaccagagcccgcggagcaaaaccaatgtaccaacaagaaactcggagcatttcaccagacccaatttggtctgcatgtcaaaatgtagggcctgtatgagtatgccattgtgcgatagcgtatggtggagaaaatgagtaaatccttaggcgaaacttattcaaaatcccaagaaaacagtcggcstaaggccgacaagggagaggcagaggtggacagcctacgcgttccccaaaacatgtgcttataaacaatcgcatcgtttcaggatggtggagaagcaccaaataaaccttagtaatacaaacagagaagctgtttgtgtctgtgtttttatgcccaagactgtagaaaaagggaaaaagaggggacagcatggaaagaaaaaaggtaccycacgacaggcgggaaaaaatcctggcggctaagtcggtgggaggagacccatggcgagggaggaaaggagggcgggccgaggagcagcawggtgacggctaaaggtggaaacgtgtgtgatgggggaggggggcgataagcaggcaaaggaagaaggaaatgaaggtccggggaacccaacatagaaaaagggagaccagtgcaaggaggctgcatgggggcccggagaacgggctgagagcgggaaccagssctaatggcgggggaataaagagggggagggggactagttgggcctgactatcctgggatgccccttactcacccttcatcctcctcgttcttactggcgtcaatcttcgccccctccgactcggcgctgcccccttcggtgcctccagacgcggttccgcccccggtcccggctccgcttcccgccgccgccgctgccccctgtgtcgccgccaccatggctccctcctgctcgcccgccgagccgcctaccgccgccgttgccgctgccgccgccccgtccccgccgaactgctcctccgacatagtgctagtgtctccgccgctgccgccgagactacacccgccgctgccgcgaaccgaaactagcagcaaagtaatccccgccgctgccgcgcgcccgctctacctcgcgaagcacacaagacagggaaggcgcgcgcgtggctgcaaaggctcctgcgcctctccctggcctgcccccttcgcctcccactctcgcgcggcgcacactcccgctctctcccgctgcactaaaaaagaataagcaccagcggcggccgctctcgcctcctcctcgctttaatggcgccgccgcggaccacctaaaatggccgacggaagaacggcgcgtcccggtcacgtgacgcgagagcgcgcccttcgcgcgtccccccacccctatccccctagttttttttttttccctttcctcctcggtcccgccctctcgctaccctttataccttcctctcacgctccgcgttgcacagccttgggggcctttaaaaggaaccggaagtgtcgtgagctaagacagtcgcgcggggaccatcgagaacaaggartgctgtttcgaagtagcggctagaggggccccctgcctccgcccccgcccttccgaggattcctggagtccactcacccytccccaccactccagtagcggcgggagcagcagcgttaggccggggtgtggctgcacctctgcgaaggctgtcgtgccccgtgcagctgcggcgttcgggtgggggaggggaggctcacaccctgcggcggcttaagcctggatttacgcactggaggagggaattagccctgagawgtcagccctgtgcccctggcgctgtccacccggacgcccgcggagcgccaggcgccgcagcggaccgcgcgcgcactgattgccgcagctactctccctgccgtcgccgcccgggaccgggtgacattgaggttttcgtctatcgccgctgggccgatagggcttctttttaagatttggctttccaagtaagatttttgtttgcctgcttttctcctggaatttttttgtttttggtcgaagaagcaggtaacttgcatatcttaaggaaaacattgtttttgcwttgcttttgttgtttaaagatcctaaaacgtaccgtgattcctttacgttactaataattggaaagtgtgttaaatcaagggttcgcttaatgttctttagcctttgtacatagaatatataaatgtcgtgagtcatctttacgaggtttatgagtttgtgttcgggtttggcttttttgttgtgtgtgcgtggtttttttttttcttttcttgtaacaccgttaggcgtttcattaaggtgtataaaaagtaattttatacacctattaaaaattcccgctgcctcggctggagactggattattcgggctttgggatttgctgcttccagcagtatccttagaagaaaatgaagcttctaggtacttctgtagtcaacaaataattatttgcctgtttaattaaagtgttcgggcacgggggaaacaaagacgagtttgcagactccagcaaaaatcttaagagtttaagtatttgggccgggcgcggtggctcacgcctgtaatcccagcactttgggaggccgaggcgggcggatcacgaggtcaggagttcgagacaagcctgaccaacatggtgaaacccccgtgtctactaaaaatacaaaaattagccgggcgtggtggccggtacctgtaatctcaggtactcaggaggctgaggcaggagaatcgcttgaacccgggaggtggagattgcagggagtcgagatcatgccacttgcactccagcctgggcgacagagcgagactccgtctcaaaaaaaaaaaaaaaaaaaaagtttaggtattttccactgcagttaaacgaatttgtattaattggacactatccaaaaatctcaaaggaagattataagtaagttttattaatcaagttagtagaatttacattacagaataattaaaactcaagaatacaggtcaaattctgaaaacgtcctaaaaatataatcttaccaaactcccgtaataatcaagtcacataaaggtaataccaagaatgtttaccgtaaagtggtagtgactccacatttgtctccacctgccagaatattagcaaaggataaagtggatatggtgctcaaaccatatattccgggttagatacaactaagatgattgactgaagggaagtctgtttaatcttttctggctcaagtgacggtaattgtcatttattttgatcttaagatatcattagacatacccaccttttggtaatagtgacttttccaaaaggttcattttgatttcacatgtagcttaggagcttctggaattcttagaatttatgtcaaaagttccagacaacctaggaatgattttaaagctaacacctttacatgctttatgaggatgtatgatgtccatatcactgatagtccttgatattatggccaagatctctacatccaggatgtgctcctgcatccacacaatattcttcttggaactcacttaacttctggcaggcgtggtggctcacgcctgtaatccagcactttgagaggccaagtcgggaggattgcttgcctcaaggagttggccatcagcctgggcaacggagtgagaccttgcctctacaaaaagtcagaaaattaacctggcatggtggttcctgttgttccagctactcctgaggctgaagtgggaggatcacttgaacctggaaggtggaggctgcagtgagaaaggcagagtgagaccctgtctcaaaaacaaacaaatgttactatttatgtgaagtcttcccaggcttcctgaggcagaattaatgatcccttttcacagccctttatctttacctctgttattcttcattgttttctactagaccatgagttcttagaaaacagtgtcttctatgtatcyctccctccctaacacactctcacacacacataaacacagcagcagtatatccacactatgtaattgccagttgaattattgaatgacaaaataataagtatgtccaacttgttagattaaggggctttcaagcaaactaggtgttcttccagggacttgaaagtctcctctccacaccatctcatttcatctctggcattaaaaaaaaaamaacttttggccaggtgctgtggctcatgcctataatcccaacactttggtaggccaaggagggatgattgcttgagcccaggaatttttttttttttttttttttttttgagacagagtttcactctgttgcccaggctggaggtgcaatggcgcgatctcggctcactcccgggttgacgccattctccttcctgtctcccaagtagctgggacaacaggcacctgccaccacgcccggctaattttttttgtatttttagtagagacggggtttcactgtgctagtcaggacggtctcgatctcctgacctcgtgatccgcccgcctcggcctcccaaagtgctgggattacaggtgtgagccaccgcgcccggccaagccaggaatttgagaccagccccggcaacatagcaaaacctatctctacaaaaaatttaaaaaatcagttcctgcccacccagggacgccttgggttgtgtttaacccgtttctgttgccgggtgcggtggcttacgcctctaatcccaacactttgagagtccgaggtgggtggatcacttgaggccgggagttcgagagcagcctgggcaatgtggtgaaaccccatctctactgaagatacaaaaataagctgggcgtggtggcgcacgcctgtaatcctggctactggggaggctgaggcaggaaaattacatgaacccacaaggcagaggttgcagtgagtagagactgcaccactgtactcaagctgggtgacagagtgaaactatgtctcaaaaaaaaaaaaaattagctgggtgtggtggcgtgagcctgtggttccagctactcaggaggctgaggtgggaagattgcttgaatcaaaaattcaaggctgcagtgagcagtgatgccacttcattccagtctggacgacagagcaagagcctgtttcaaaaacaacaacaacaacgaaacgcttcttcaaatgacctggtgatggatgtatgaaatttcttgagaatgaaaygaaactttttgttacacattcataggtaacaattaattgtttaagtggctggagatgctgtattggacttgccccaaacagtagaaggaaggaatatcccctgtcaatgtacagacatgaactattccattgctttaggagattcccagtgtgtttcagataacacactaaaatgctagatcatcattgaatttagcctttgtaaagcaattattctctgcagcaaaaactaaagtacttgtaaaaggccaaaaatgaagtctgtttgagaattaaactggaatcacttttacctagaacaagatgcatacacctaagccaaggaagtcagttttcatctgctaggtgcagtctgcaaatgcagcaggaggttcccttatgttcaaatttttaaagtattaatagggtatgtatgccagttggcaacctggaataaacagtgtggaagaaacagccaaagaacccatttttttatacaaggtacacatacttgagctgcttctacaaccatgttaaacagcctataacctatctggacctatttgcagaacaccatcagtgggatttaagcattttgttggagagttagtttgtgattttacgtgaagtgaccaattgcccatgcagtgaacattctctgtcatattccttggttatcaggaagcttcactttattcagaaaataaaagccctatcaacttctgaaaagtcgggttttacttcagccataaagtctaatactgtagagtcagttctgcttactcatgaggatgtcaatagtttcttttagatacagttttttaaaacgtagctcaaaaaagaattcagacaaagctgatcacacgcctgtagtcccagctactcagaaggctgaaagaggagattcccttgaacccagtaattcaagcccagcctgggcaatacagtgagacccccatctctttaaaaaagaaataataaggaaatacactcctctcactccagacctacatatcaaactgcctatttgacatccctacttgaatgttcacaggaatctcaagctttagatgtccaaaactgaactctactttccctacaaacctgcttctttggtcttcctcttctcagtaaatgacatctccacccacccatayattcctrccaaaatccagggaatcatctttgatatcccccctccctcaccccccacatccaatcaatcaccaactcctcccacctccaagatatatcttgattcatctaaatgcttcttagaacataaatactggggtaatttctaggtagttattcactttcaaccatgcaacacattaatggcacatgtacatttctaggactgggaaatataacagtgatcaaaataggcaaggtctctggtctcatggagctgacattctagtggcagagacaaacgacagacaaatagatatgtaatataattttaggaagtgataggaagaaaaagataaaatgctacacataggatatgtgctataggacagtcagagaaaactcttcaaggaaataactttttgagtagtgccctgaagaaagtaagagakaaaaccatatacttagcttagggaagactttacaaggcaaagggtacacctgaggcaggagcgtgatttgtgcttacaatgaaaaatggagtccagtgtggctaaagtgaaggaaagcaagtataatagatcatacctgagaggtagccagtaatgagcttactcagggtcttgtaaactgtggttrgcactctacttttattatcaaagtcatgagaaaccatggaagggttttgagcagaggaagaacatgacctgactttaagtggaagataatggatgctgtgtggacggtggactgtgggaggacatcagggagatgagttaaaagggcactgtcaagaaaagactttttttttttttttgagacaggatctcgctctgttgcccaggctagagtacggtggcacaatcacaactaactgcagccttaacctcctgggctcaagtgatcctcccaccctcagcctcccaagtagttgggaccacaggtgtgcaccaccacacctggctgatttttgtattttttgtacaggtggggtttcaccatgttgcccaacctggtcttgaactcctcagctcaagtaatctgcctgcctcggcctcccaaagtgctgggattacaagcgtgagccaccgcgacaggccatgaattgactatttttttagcctttcttggttaatttattctgagaagataaatctacaaagagggtgttatttacatgtggtcatgtgactttgcttatttttcctagaaggatatttttctgcaaagaaaaatcgtgctctaatgacaataagggatcattcaaaattaaacaagaaagacttgaattaatattattgataatatttccagtaaagactcagactagcgttttcatccaatgcaatattttttcctttattttccacccctttctgaagttctggaatgagattttgattagctactgcaggtggcgtttgtccataacgtcacaggatcctttgggtgtctctttgccagccggaaagctctgcggttggtagcacctctgctaccatgccctctgggcttgttccgcccacgtggcccagcaggctgcactccacttgcactaccagcccagatctcatgcctgccaagggtgagccatgcacagagcagtgaggggtgtgtgagtgagtgagcatggagtctggccactgtgtacagccaagcacgctggctgctgcagcagggtgagcagctccaggcaccagcacaagcactggctccatgcgaggctgcggctggacaagatgtactgcaggtggcttccactgcaggcaccagcgtctggatgaggggaacatagtggcgcctgaaagttcagagacaccaggaaccgcagaaccccaaagagggtgttacagcatgtcacagccccagctcgaaaccctgaggtctgggctcccagaagggccacagctcttttctccttcttgtcacccacagcttggggagttgrggggcatgtttcagcccatttgtgttaacagctctttcagtgctgccactctgctccagcctgcggctcctggactggccyagccccaccactgcttcccattgtgtggggcagctgcccagtgccrgcagaagacaggaaggctatagggttacagctctggcttgggaaatcctgaggtctggaaccccagaagggttgtcactcttcactcccacagtctgggagagtgtcacttgcctgcagctcggtgagccaaccagaaaagtgttacagcccctttagctcccacccacagccacagctcctttcactcccaccatttggcaggtcccaagttcttgtcccacttgcaggaagaacgaggttatgcgggcaactggagggtgagcaaggtggagaagagctttattgggagatcaaacagctctcagtggagaggagacctgaagtgggtatctcctatcctcagggaggcagtcctgaccagagtctgagtatagctgagtccagggtttttatgggctcagcatggagtaagtgcatgctgactggtccatgggcaggaggaagtgcatgctgactggtccatgggcaggcctggaaaaaggcgcctggcctatccagccacttttaaggttcttttagctgctaagtttataattgtcccacttagtttgcaggagttgcagttcaagagaataattattgaaagaatacagaagagtcagggttttcagattaaggttcaatttagaaatattgaaaacctaagaaaacgtttaggaaagtgtctctgtcctgtggctctttggggccttttcatttgttgcagtggctctcagttatttgatatttccttactccataagagctgcctcagaataatcactttctcatgccagggctgagagttctcaggctctcagactcagtacaattgcttaaaagtcacacttcaaaaatagtaacacataattagatagtacctctgtaggaggggtttttctgtttaactaatttatatccttgatgttttggctactgtagtagacatttgctacttggggctccccagcatcagtttttccttctcttagtaataaatagcataggagaaacaagtggagccagaggaggtaatacagaacagcaagccagctcatcagaatgaactcatcaccactggtaacattgtggccaggcacagcccctaagtcagctagtcacatttgaagaacttccctttgaatttttttttttttttttttttttttttggagaaagagtcttgctttctcacccaggatggagtgcagtggtgcaatttcagctcactgcaacctccgcctcctgggttcaagcaattctcatgcctcagcctcctgagtagctggaattacagatgtggaccaccacacctggctaatttttgtatttttagtagaggcagggttttgccatgttggtcaggctggtctctaatgcctggcctcaagtgatccacccaccttggcctcccaaagtgctggggttacagatgtgaaccactgtgcccagcccccttttattttttctattttatttttattttcatttttattttgagatggagtctcgctgtgtcacctaggctggagtgctgtggcccaatctcagatcactgcaacctccgcctcccaggttcaagtgattctcctgcctcagcctcctgagtagttgggattacaggtgaccaccaccacgcctggctaatttttgtatttttaatagagacagggttccatcatgttggccaggctggtctcgaactcctgacctagtgatctgctggtcttggcctcccaaagtgctgggattacagacatgagccaccactcccagcctccttttgatatttgagtgaagaaatactctcctattggtcataaacagagcatgtagctaagggaaccaactactggcagccgtttcacagcagaaagatccctatgaagacaggaatcaaacagcaaggaagagttactaagatgtggtaaacaggataccaggtcatggtcacattctttgaacaaccagatcgacttctccctacagctatctctgcctctagacttagtcacatgattcagtaaattccctttatcatttaagctagtttgactggccagtttatttctctaaatcaaaggtatcctaactgatttgttggttgtcaactttgcattataccacccacttgtaatatctctgccttgaagaggaaaaaccaggaacatttcctagaatccccttcccgttatgatcccaagttaggatatgccagtgagaggtgctgttttagtcccttttgcctgctgtgacaaaatgacacagactgggtagcttataaacaacagaaatttatttcccacacttctggaggctggaaagtccaagatcagggtattggtagattctgtgtctggtgagggctcattttctgattcatcgatggcaccttctcaggggtcctcacatgcggaattgataacgcagatctctgggatctcttttataagggcactaatcccattcatgagggttctgccttcataatctaaccacctatcaaaggccccatttctagtaccgttaccttaggggttaggatttcaacatgacctctggggagatacattcagcccatagcaggtactcacaatagaataagaaggcaaagcaaggaagcttttattctcaggatgtggaagcatcacccacttctcccagtaagttgtggccgttttcaatttctcaatttctccaycagctcccactttgcagttgtgtcagccaatcacgacagcttcccagacttccgtgcaagtgcctgctttgaggccaaggtggccataaatggcagctcctcaggctcctccacaatctctggtttcttatgtttctccatgagctcagctttttcatcaactccaatgcttcaagccgaagtcattagtgaatgttctacaatccttcagctgcagctccagaccttcactcctccagcttctcctacatccatctaaccctcaattcctacattaaatctctttattccagaatacttgcagtgactttgttttctcactatacccagttattagtaagataagtagtttccaggaagctacactttaaggataaaaattttctgatcccatkggatttaaaggttttaacgacctcattgccagtgataatggcattggtggtccatggcatacagtggcaaaatagttactaccttggatgaccaagaagttgctgcaataggattatataatggaaataaagggtacaaggattgtggagtgggttgactatttcaaagtacactggagaacttagaaaaagaaaaagataagctcaaggccttaaattcctacttcaagtcctggacaaggaaccagaatgtttcttatctgcctgggaaaaaaaatcttggccaggcgtggtggctcatgcctgtaatcccagcactttgggaggccaagtgggcagatcatgaggtcaagagattgagaccatcctgaccaacatggtgaaaccccgtctctactaaaaatacaaaaattagctgggcgtggtggcacacacctgtagtcccaactactcaggaggctgaggcaggagaaccrcttgaacccaggaggcagaggttgcagtgagctgaggtctcgccactgcactccagcctgggctacagagcaagacactgtctcaaaaaaaaaaaagaaagaaagaaaatcttgcctcatgtagctacatggtcaagatttttgaaaattgaacccaaattctgaccataaagatggctgaattataaagcaaatggaattaacttgcatgatctcttaggctaaagttaaggtattgatcaggaaacagtgaaactttggaaattagagtttaaacaaattccaatgaaccagatgaccttgaacctcaaaattctgccaagccttcattgkgaacattcttcctctactgtgatagacagaataatggcccccaaagatgtccacatccaaatccataaagtctgtgaatatatttctttacatggcaagagggacatttcagattcttgatatggaaagattatcctagattatccaggtggacccaaggtaatcataagggtccttgtaagagggggacaggagggccagggtcagattacagttggagagattgaaggtgctgcaccactggctttgaagatgaagggagaaggccacgtgccgaggaatgcaggtggcctctggaagctggaaaaggcaaggaragaaattctccctaaaaatctccagaataacacagccctgctgacaccttaatttagtccagtgagacctctagaactacaaaataataaatgggttattttaagccactaaatttgtggtaacttgttacagcagcaatagaaatctggtccatctactgctgtagagattagtctttccttgcctaaagaacctataatgaccattcctgaagtagttgctttgcagagaaacactgatgcaccttcagacccacacctatcacctctcgtatcattgcttctagatgaataactagacttgagaccagattcaagtccttgatgaccccaacagaacaagtgcattgcataacattctataatgttgaccatagttgaacacattcagaaagcgatttgtaaagactgctaaaatatattttttcaatgggtacacagtatttgttcatatggactggaacatgagaagtagcttttgggtctgctgatagcttaactttatagccaactggcagcctaggtaacatatagctttatttgtgggggctgatttttttcccttcatattacaccatggttgtaagatgatgataatgatccagtagaaagagaaaaactggtgatgtaggggtagaaataggggaataattgcagaagccaagttcttaagtagctgagaggagatggaatccagcacacaaggtgaagcagagacagttcatgtgttctataggaagggaggaagcttatgtgaactgatgtaactcagttagtaggtttggtgttaaacatgatcagttctgattcctttcacttttctcagtcagttaagaaatctgtcatcagctgagagtgtggacargggaggagatttaagggtattagagaaagacgaagagcaaattcactagctccagggaatttaaggctaataaagatgacagaaaaaagataggacccacatagagccttggtgagtacttgccaagaccagctcggtcagggagaccctaaccgagtggcgctagaggaattaaagacacacacacggaaatatagaggtgtgaagtgggaaatcaggggtctcacagccctcagagccctgaacagrgatttacccatgtatttattaacaacaaaccagtcattagcattgtttctgtagatattaaattaactaaaagtattccgtatgggaaacgaagggatgggccgaattaaaggaataggttgggctagttaactgcagcaggagcatgtccttaaggcacagattgctcatgctattgtttgtagtttaagaacgcctttaagcggttttccaccctgggcgggccaggtgttccttgccctcattcccctaaacccacaaccttccagcgtgggcgttagggccattatgaacatgttacagtgctgcagagattttgtttatggccagttttggggccagtttatggccagattttggggggcttgctcccaacaagtactattagaaatctacctctaagatctgagagccactccctccagaaatctctggcaggatatcattgatgtatctttttagattctggtcatttaagcagttacaatctatcttatgatctcttcaacccactcttatttctccaccttgatcctgaggactcctgagaaacccagaaagttaattatcttttgaattgtgtgccaaagcatgactcccttctctgaactcttctcctaaccagatgtggtcgctagcagccaattttacatgaccccacccccacctcccttgccattgccaagtccagcggtggacacctgacccaaactggtcaattggatatttttttttttttttgagatggagtctcactctgtcgccaggctggattacaggcacatgccactatgcccagctaatttttggggtttttttgttttttgttttttgttttttgttttttgagatggagtctagctctgtcgcccaggctggcgagtgcagtggcacaatcccggctcacagcaagctctgcctcccaggttcacgccattatcctgcctcagcctcgcaagtagctgggactacaggcgcccgccaccatgcctggctaattttttgtatttttagtagagacgggggtttcaccatgttaaccaggatggtctcgatctcctgaccttgtggtccacccgcctcggcctcccaaagtgctgggattacaggcgtgagccaccgcaccctgccgatcaattggattttatgttctggaatggaaattgggatactgggtctctaaacagttggccagaggtgctggaggtaggaagaaattatattataggactgagcagcatttttccaccatgtgaattaaagaagctgagaacaggccaggcgcagtggctcacgcctgtaatcccagcactttgggaggccgaggcaggtggatcacgaggtcagaaaatcaagaccatcctggacaacatggtgaaacccggtctgtactaaaaatacgaaaattagctgggcgtgctgtcacgtgcctctaatcccagctactggggagggtgaggcaggagaatcgcttgaacccrggaggcagagtgcagtgagccgggatcacgtcactgcactccagcctggcaacataaccagactctgtctcaaaaaaaaaaaaaaaagaaagaaagaaaaagaaaaaaaaaagaaataaaaaggaaaaacacaaatcactcataaggtcataagactaccttctgaatataactactctgagcagttttatgtatttcacaccagttttttccttatgtgtttggtttaaacaatgaaattagagtacaaaatacaattgcatatcctgcttttctcgttagatattatgccatacatatttcctatattccttgctgcatagtcttcatagctaaaattataatggatgcctaaaattctattgaatatggtataaaaataacactgtggtgattatctagcactcaccagcttgaaattccaaacttagagaatatggctatttttgtcactagagaaggcctctttggtagaattagaaatagttaatcagactaccatttcatgcctccctcaagattaatgttcatcatcttttcctttttttgtggattaatcactctttgataaacaattcagcctcctagttaccctcatgcaaggaaagcatcactttttatggcagttataaaggtcaggccatgggaaagaaaggcttctcttgtccttacaattgtacattrctaaataaatgaattagtgttttggattttgcagtggtgccttgtgagtttgattgtgtggtagcacaatctgagaactagactttggtctgtggtaggcgtactaagatgccaccctgtggcccttctggggaggctggccagcccctttcattccaatctctgtcttctgagctttgtccttgctgactatggaagacctccaaactgaaactgacagaagacagccaaacaattgcagattaatttgcagaatgtagcagagaagaggatacagtaacctcatctgtattcagagcttcaaatactgtctcatactgataacttttaaggtgtcggatttctgctcattgttattctctgtcatttcaggtgtcttctatcacatacagacttggcattatcctgattttcctcctttccttccttcaacattttacttaaagccctcttgatcagtttggcatgtttctgggaaaatgtgttttcccatagtcctttagggattcactctgcccctagccaagatyatccaaagatgtgattcaggaaaccaaactctatgcagctgtacatctacataccatacccttcttcttccctcccattgccaatcttctactgaaaaccctgttgagaatgctgtttgtatttccaagtacttcatattctggcccagcacctcaaaatatttaatatacattctaggtttcttccctcaaaattggccgggcgcagtgtctcacacctgtaatcccagcactttgggaggccaaggcaggtggatcacaaggtcatgagatcgagaccatcctggctaacacggtgaaaccctgtctctactaaaaatagaaaaaattagccgggcgaggtggcgggtgcctgtagtcccagctacttgggaggctgaggcaggagaatggcttgaacctgggaggcggagcttgctgtgagccgggattgtgccactgtactccagcctgggcaagagagcaagactctgtctcaaaaaaaaaaaaaaaaaaaaaatcrgtgaaagcagatagtgtccaccacatttgataagactgtagaccaggggtccccaactcctgggccacaaactggtactggtccacgcctgttaggaatcrggctgcacaggaggaggtgagcggcaggtgaatgagaattacagtctgagctccacctcctgtcagatcagctgtggcattagatgctcacaggagcacgaaccctactgtgaactgctcatgtgaaggatgtaggttgtgcactgcttataggaattgaatgcctgatgatctgaggtggagctgaggtggtgacactagcgctggagagtggctgcaaatacagattaacattagcagagaggtttgacggcagagaccataataaattagttgtttgcagactcatatcaaaaccttatcagcaagtgacaattaagcttcatctagtggcaagctttaaagtggcagatgagtcgatgtact

SEQ ID NO: 9867 - DNA, 25458 bp, Homo sapiens
tagccacatttcaagtgctccatagccacatgtggctagcggctcctgtactggacagggcatccacagaacagtccatcatggtggaaacttccactggacggtgctagactagatggaagaacggaactgtgagccttgggtatttacatttatttttaaagacgtaggctgggcgtggtggctcacgcctgtaatcccagcactttggaaagccgaggtgggtggatcacttgaggtcaggagttcaagaccagcccggccaacatggcaaaaccccgtctctactgaaaatacaaaaattagccgggtgtggtggcacatgcctgtaatctcagatactcaggaagctgaggcagaagaattgctcgaacctgggaggtggaggttgcaatgagccgagatcgcaccactgcactccagcttgggcgaaagggtgagactctgtctcaattaaaaaataaataaataaataaataaagatgtacacaaaacagtttaattgtggggtcactttatagaagcttctttaaagcatcagctttccaactgcacacaactgtttcccctaagcaacttccaaggcacaaacccagtatacattctctcctaagcattatctcagttgtacattcgattgtagaatatctttcttccttaaaaaaaaaaaatctctcacccaaaacttaagagaaaggggtcatttacaggagaaagggcaaatcattatttttagatggaaagacctccctaagtcaacatttaaatattaaaacatgtagcaggtagtaccaaagggtttctccttcatcacacttgtatttctttactgtcgaaattctctgcccaggagtcagctctgtgtgagctgaaagcaagtgttctgtttgctattgcacatccattacaagcacagtgcctgcctgggacaaaacagatgcttaaatttttgtggaatgattgaatgaaacttaagaagaatggtattttgctaaagaacagcaaacatccttttagagcctggttccaattctttatatttggatagcaatccaccctttattttcaaatgcaaacttaaaataacttagcagactgattcatgcaagtatgcatgctacagctcagtatctttaatactcagcaaaaggcatacagcatctatgtcacagtaaaatatgagctaacatttattgcagttaaacaccaggcccaacgctaagtgttttacatatgctattgcatctgcccctcactctgatagtctctctgctaccaggaggaggaaaccaaagctcaggggaaattaagtgactggctcaagccacagggctagagatgtatagtcagaaaagctcccctggtgaagactatggacgatgcccgtcatatagcctgattggacaattcctgctttaatcaggaaggctacgattgtcctcgtctrcaaggacctgcctccaaggaggggcatggctctggatctttgcagccccagagcttagttgagcacctgccctgcaggcctcccacatatttttgtggagaaagactcagcagtcctaawggcttaaggctactcagacttggagaaggccccttctacagaagcaggcacagctcagcacaccccgtctccctctaaaccgaggctgyggggaaatcactgtgaccttgccactatacagcagcttcatgctttggccaccgtgttgcagcctctacggccactctgctctagtaactggcctccttctgcaaactgaccagctgcaccagcatcacggggctggcagcacttccattattctttttcttgctattcagaatttcaacctaataactccactgttttaaaaacacagtgctttagcaagaacctgttgtgctccaagtactggtcagacaactgcctttaaggggctcactttcctatttggcccaattccctcagattagggtttccagaagtctgacctataagcattcattttcataaaaaccactactgacaaagcaacaggttctaaacgtatacattaaagagctaattttttgttggatcaatatttgtcaagggcttgccaagcgggggtacaaaagtataataaaggacatcaatccatgtgggggaaaggtaaacaaatattaatcaagtccctagtgattctacataattctctgtaattctttctgcagtcctatagcrtagataacatctccatctatggatgataaaaagcactgcttgtaataactcacttcctaagtacctgcaaggcacgaattcagggccaggcacagttaatcctcataactccctcaaggaaaaggtattactacttccttctccagaaagacaggctcggggcgtctgtctgggtccgaggtgcccacgctggctgagagcgctgaagtggagtcagacacacaggcctgcctggctccacagaccatggtgccattaaatgagactgtcctcactctcatggggggacacagagaaagctccccaccccaaccacaggaggaraagatgactgtgggagaacacatcaccatacagcatcagtgtcccattagcgcggaaggcaagattgacaggaaaaacaaacaaggaaatagtacagtgggatgcgcaggggctgtatgaaggtggttctagaaaatggggtggcctggcacaggggcagccattccagaactaggaaggcagggtaaggtactccacatgtgtkggggggggcaggggtggagggagtgagaggggaacaaagaccaaggcaggctaaagtcagaccgtgtagaacccaaagccaggccagggtactcgtactgcctcatgcaggaaagggggaaccagaacactggggcagggattaaagtagtgatgggagattcactgggtgtcactcaaagcttgtctcaagtcacagggctcttctattcccccgacttatctgaacaggagaaatcctcttggctcccagacccgcctgccctggcattctcccgcagggaaacatgctttggttgttcagacgtgacttactggcacttagaggctgttggcatggaaaaaatgaacaggctgacctggccagaaaggagcaggtgatgcagaaacccagcaaaagatgaattcaccctgccaccctgagtaaattacaaagctcatatgaagggccgcagaagaaagaatgggagagatgatttaccagacagagaaggggaagtctcagccctaggcacctcakgagcccaggagagtgccaggcaaaatccctaaggcacttcactgagtcctacaacctcgcatagacatcactgtgctcatctcaggcaggggacacccaggctcactgtggcgaaagcacctggcccagatgagtaagggagagaagccggagcacacatcactggagcacactttattacagtgtctttctgccttcaatcacttgcccmgttttgtaacttcataagagagtcatgatgcccagaacctcatggccccggggcaaaactctgcaccagctctgacactctccttaacctgctgtcaccacacgatacacaagaaccattcctctcaaatcacgaaacaaaggttaaacatattccaccaataataccacgatatgcattaattccatcagtgtggaaaactattccttgtgggagagggcgcacagacagacaactggaagagaaaaaaacagagagaaatccaagtcagatgttgtgcctaacttgaggcaggacttttcctgggatttaagtaggtctggaggctgctctggcacatcctggccacccaggccacgccttacatttctatttgcaatgcaccttcccctcctcctccactccccgcacttctccccaagtgccccatcactgaaaaagttcaggggccgcaggggctgagacggggcgcagggcaccgaccctttcaagcggccacggctttgcaacatgttcctgaaattcctacaaaccaaaaagcaattcagaatcgcaggagggaggcttatcctccactccgcaaaccagaccctcaagatcatcttttttatgctgaaaaggcttttcacaaaatattccaaaccatcttcatagattatttttcctttctcttaaaaaactaagcaagactggatgtcatttagaataccgacttctaaaaaagggcatttttgaactgaatgccacatgctgtrttttgcyattttgcctgcgcttcctgcttggagcctgtgacacagagaagcctcagacactggagctgctccgggccacgcaaactccgctccgcatcttccaggcagccctgtcgcaaataattcatgtccactacgcccctatcacactgaatacaaccacattgtactgctggaaatgggaaacctgattcagatcacaggagaaggtagaaaaacatttggttcaacacaatactgccccccttcttttttttaaagggaggaaacatatttcaaacctaggaatagggaaaggattcaagacccatcgtggaataaaacacagaatttaaaatagcatccgatgtgacccaaaccagcaacaataacgagaaaaccacccagtccttccagagatgcamcttgtttctgctgcagtgttgctaatcaaaatcgatctgcccatccaagcaatttaaagaggaagggcggcatttgtagaaaatggtacatgttgataaagcatgacctgtcccacatggagagcaataaaaggaaaacaagcctgagaacagtatgctgtgctcaccaggagatggaagagaaraaagccagaataagggcagggatgccgggggaagggaggacggggtgtcaaaggcctgcaggatttttgtaaacagcagcccgtaatggccacggtgagagagaagggaaaacagacatggagggaaacgtgtttacaactgcagcgacggcgggaggcggagggagggattccccgactctgcactctgcgctcggcccgcttcgctccggtggggccccggggctgggatgtgttttggctcctccaccctccacccgctttcttagtsgggggaacacatcttgtttatggggaaggttactcctcctctgctctggtgatcgcctccctaatactcctgctgcatccttgcgggatgcccacttgactgacagacactccagccagtcgctgcccgggccccgcggaaaggtggaatttcccaacgcagcgattggccggcggggagggtgggccctggtgattggcgtgttattcggagtggaaagtagtaaacaaccttggtccacggcggcggcgcgggcgcggggtgcccgctccctcttccctcrcccggggcggggtggggcgcgcgcgccagacaaaaggagcctcagcccctcggaggggagagcaggaagggcgcacaccacagccggcggagcgggcgtcccccggagcccctgcgccagaactgctgacttgcagcttcacatcatttttgttctgtggaaaaccgcaaaggttttgtttccataattcggctcctcttcttcgtcttaggttttagaaagtctccaaagagaatggcaatttagttcctcctctttcctgccctccaccccaaccctccaccttttaagattaatttttagttctgtctttgcagaagttgttttaaatccctgtrctaaaaattgttgctttattcacacaatacgccattaagggcacacgggtgaatcagatgccccgttagtccctttccttgcaagttcctggagctgtgatctcactgggaggggctgagtttgggagcaggcataaaaagaaacatgatgatattaggctcacttgacaagaaataagcagttacaccttgccttttccacacaggatgtagttcacccaggctatcatctgacattgctaagtccccttctggttggtcttgactcacaacccattcctcattctggcctctccatcctcacaggacccccagccaggggaaacttcccagcttccagcgggaagtgcygcttccccaaattgggcagcacctggggatgcctctagatgcataatcacctcagaggtcctgagccagagtccagagattctttctgagattctggcaaggccccggggtactgatggaggactgggaaggtaggagaaggccacggggagggggaggctggacacaggagggatctccacttcatttatgtgctctttggtgcttcgctctgatggtaagtcacgttgtcactcttggccagacagccagactgtccaagctgaaaacgtaaacaaaagctccttgcaggaagcaacagggtgcaaacttgccacctggggggcctctctgccaccccttggccarccctctcctccagcatctggccccaccccggccctgcccgcctggcatgtaaagcaccccctcctctccaagcatccgttcctcagccgctgtgttcctgtcgcaggtccctggatgggccacacacaaaccttcactcagcttattctttctaggccttaccctgcctgcccgggagaggccactgttctccacggcttcccttgccctggccagcccacttcctgcaggagtgctccgaaatcggttttggtagcactgtgttaaggttgcagatggtgttttcaacactgtactccgactctacttgcaggtttctccacctcagtagaccctgagcataccagggcaaggtgttatattctaatttgtgtctccagtggagacacaggtccacaatatgcactcaatcaagtcttgccaaacatttgcagcactcagttctcgtcttgtccaacactcacacctgcttctgctgcccccaagtcaagtacccctacctagtttcttgctaacatgttaacatggtacccccccccaccaagtgccaagcccttgtccatcactcagtgattccctgtacacatgcagttacttgtaacgtatgctgcttcctctgccagttatgcttttctgacttctcttcttggcaaattcctattctgtctaaaaatcacttcttcccttggcaacatgccacaagttccacctgactcctctgtgctcccagagcacctcagagaggcctcgttgcaacctctgccatcttccgaggacatggctacagagccacagctggcatggtttgctggaagaaccaagagctgaaaggcagatttaccaggtggtgccccccccaggtgtctgcagaacccacatattccagtctccagaccatggaagcagtgctgtttccagcttgtctctgccacagggtccttctctgctctctcagcctgaaggcctcctctgtgtctgtgagtggctggctccttctcaaccttcattcaggtctccgctcaaacaccaccctcaccaccatgcccacctgccagctactatcmcacagaccttcattttcttcatgaggtgattctgaagagaaaataagcttgggagctatcaccctaacttacttattccctcagtgatggaatttgggggacattttcatcttttgccatttgaaacactacaatgaacaactgcacaactgtcatttcacatgtgtgcaagtctatggggtaaatgccccctctaagattggtgggtcaaagaatacgtgtttataacctgagagatattgccaaattctcctctatagatgtgctattctgccgtcctcccagccatgtggggttgttttccaaagagtgtgttatcaaatattttggattttttccaatatgagaagtgaaaaaatggtatcttggtgtagttttaatttgcatttctcgtatgagtgaaatcaaactttttttctatgcttagctatttgtgtttcttcttctgtgagctatctgttcaatacttcatcccaaatcctattgaactgttagcctcttccttaacaatttctaggagctctgttttactttgtttttttaaacaagggagattagctctttgtgatagaagtttcagatatttttctcagtttggcatctgtctttgcttatggtttttggccatgcagaaagtttttttgtaatttaaattcaatttttatgaatgttttcttttctggcttctggattttgagttgaaactagaaaggctttctctgctccaaggttataaaaaggaactcgctatgtgttcttccaggactttcatagttttgtttacacttttaccttggattcacttggagtctagcctggtacatggtataatgtatgaacctaatttactttcttttccagagaaaagaaacatggcatgattgggccataatttacatgccccaatccagtaaatcaagagtttatcttagtcccaatgatttgtgaagctacctttatcgaataactaaatttccacaggtacttgcatctacatttggactttctattctgttccattggtctgtctcttcatctattggtatctcactattttaattatttaggcactatggaagtttttaatacctggtaaggactccttgctcttgttcagttttttgtttgtttgtttttgttttaatgataacctcagaatctaactaaaagaaaaaaatctgttgtatttggatttatattaaattgaaaaacttacggagaactgacatcttgccatcttgctaatgatgattattcctgtctaataaatgtggtatgtctttccatttattccagttgtcttctgtatcttttaatagtatggttatcttaaggtgttttctctytttattttaattggatgtagaatcttcagtaatatcatctagcaagttatttgcatattgtacagttgtatgatgataaatttgtatgttatttctggcagaagatgttctattctgtgcctttagaaggacacaatgggatgggggggaatcaaagggtgatagtcttaacaataaatagaggttgagatcctaatcaagaatcaaagcaatacattytgagttggcattcacaaatgagtaagtcaaatggtgtggggcataatgctggggtggccatggaagaattctgcccaacagaggatgatgttccttaagcttccaacacagcaggttcagagaggttaggaaaaataagcaaggsaaagaaacaagtactgatctaacaatgacggaagctgactccatgccttadtggatgcttgcggaggatggcactatcttggctgggctgactgtattagcaatgcatgtatctaaatcagctctaaaacccatagagagactggcactttagtgtgaacacgtaaactgtgggtgatggtctgtatttcacataagttgtgatcactgcaaggctctgctggtattttacaagtcaaaaacaagtttcctcttccacagccatatgtttgaaagatatgtccctttaagaataatcaaactctcacccaaaacatgtatttttcaaacctagaggttccaacttgaaatactggaccacagggatactcagctcagatcctctttcagaaaggacttgctgtccagctccagagtgtcactagcagatgccctccagctgctagctcttctagggtccacttcaacttttggcctaggtcacactcttcctaggcagctcctggccagtaactgagcccagcaatggtcccagggcccggttatatccatctaacagggggctctgcaaatgagctcccggagggctggcagagtgtctgtcctatcagagtcctggtcaaaccgctccccacacccatcatcttcctcctctcttcctttcattggtgttatcctcagtaaacctttcacatccctaacttcatctcagtatgtctcctaaaaaactcaaatagcaatgaaaatgtttagcaaattttgggaaagtaaaggggggaataaacattcccacataatgtagatccagacgattctggaactagaagtagaaaggcctcatcacacaagccaactaaaatgcacctcaaaggttaatgtcatcgaatttcaaaagtcctcgaaacttccatggttataaacgagcatttcctgcatgctggactcttcatcgttggtctggattaatcctcacttccattctaggtggtgggtacaaggacttccattttatagacaaggaaaacctgatgtaagtaagtggtagaaagcagattcaaatgcaggcaggactacctggctccaaagccttttcctttccagatggtacactgcccacatctcttagtttatcggcacagggtcaagaaggtggtgagggtatggactgacayggcatctacggagctttccatacttataccaagacgcccccctgtaaagagtggactgtccggtagccgggcaaggtggctcataccttaatcccagcactttgggagtccaaggcagaaggatcacttgaggtcaggagttcgagaccagcctagccaacatggtaaaaccctgtctttactaaaaatgcaaataatagccaggcatggtggtacgygcctgaaatcccagctacttgggaaactgagggatgagaatcacttgaacccaggaggtagaggttgcagtgagccgagatcatgctactgcactctgacctgggtgagggagtgagaatttgtgtccaaaaaaaagaaaaagagtgaactgttccgcctttgtctgatgaaggaatataataattggcagccatacactatattcccgggtcaaggaattcctgggtcattttcagcaagcctaaaacaaggtgttcacacatttatttaaaaatatcccaacaaagtgttgcaaaatttcccttgattgcaatgattctttaagctgttaacattaatcttgggtggatgcaggagytgtccactggctttccaaaaggcatccaatgcctttaaggcagcataagagaaacactgcccctctcgatgaactgggtccctgagtctggcagtactgccctgttctccactgtgtcacctatacagggacccctgagaagaccagtgtgcatgaaccagagactggacagtgcctctgttaccatcaccgtgtggtatcatgaagaggtaaccatcccgaagtcacccaacttgtcagcagaactactgggaaaagagcttaacttttcctgtacttaaattcttccatatgtagttggagttacaggccccaaagtaaagacctattaagcttgcctatattgctcctaaattctctactcgtctgttcattatttccaaatttaataaggccatactgttgtgtcttcatcctggtcaatgcatccaatgataccttgataactttatcagagcagtagctagcagaagcacagaggcacggaggatgttaaaactgctcaacaccacggtacaaatgcattgtcagcttatgtaggagtctgctttttatgcaggcttatgcaactggtgtaattttaaaattttataagccatttgaaagagcaactttgatattaatgaaatggggagaaatgtatatacagtcaaagaaaagtgtctttcctttagctgatgtcagagactccctagaaatgaaaaattattactgtcttttagaaaaacaaaggttaaatggaaatagcactggcaggagtcatatcacaacagcaaaatataacagggccaggcaaaccaaggatattgttgcaaatgcagagccttgatcaggctcatatctcgaaccttttattttgtaaagctgccaattttatagcacaaaaattttagttagggcacctttaagattcactgcatctactatgagaagagagaatgtcttagaagagtttttaaaaatactactttgaaacacttatgggcaaacaagaattggaacactaatcactgtaatttccccaccaggatcactaggtaagacattcagagaactggtggaagcaagtgatgattcagatgcagtagtagaacagaagattgccaatcaactgcaaacaaagtgccgcacaggcccatctcaactgacagcaatggtagagagagaagagagaaagaagagagagaagagaaacgagagaagaggagagaggagggggaggaggaggaaggagggggaggaggaaggaggaggagggaggaggagaaggaaggaggaggagggaggaggagggggcaggagaaggaaggaggggaggaggaggagggaggggaggaagagggagggggaggaggagggaggcgaggaggagggaggggaggaggaggagagagaagaatatgagaagggaagttgggagagacacagcccgactgactcagattccaaattacatatgcacaaagcccctcaaaggttatcatgccctatctgatccagggtaaatgaaaactaaatactgaggcgcaattcacaaggaaagtcagagtgtctacactgttaacaacatacattgaataaagtattagaaacatatttactcttctccctactctcggtgctactgaccgtctactgaatacaaggtacaagaagagtttgctaagttttgggtactgcccaggtcgttccacggctaacaaggcaaaaacactcatgtaaactccttggtgggcctggtatgttgtgtgtggagagggtgcctgatgatgtctttgaacttcactttttggtttctcagctatctcagaggtctggctgtagaattactaatattttaaacaatgcaaatgtaattatagttgaagcatactctttaacagaaggagggaaagattggcatttagaagcttcattcaacttttggccttttcaaggctaaatgaatcttagggaagaaataaaaagttcccattgattcacttaaaaaaagattkcttgcaattaacagatctaaatctatgaaaaagggagcatttatggtaatttccataatctctcactttctctagacatttcaaatcaaattgtaataattataaaatccctccttctctctaaatacacacacacacacacacacacaaatatagttaatcagcaaaactttttctgatctcaaggaaatgtcagttacatttacacaagcctaactagtttaagcaatttatttgtaagtagacatgcctcctagattaggaaaaaagtgtatttagctgtatggcatgacacgccccctaccccaaaccgtaaatagtttttttggcagggagtcagcagaagagctataaaaacatcttcagggtatagaaagatgttcaggacttagaatataccttttctcatggttctcttatcccaacgtataaattgtgacaatttgtttaaaagattgaactaaaytatgatattctctttgtcttccaaatttatttagacttggtatcctgttctttctctggaatttcctttgcttttctttttgtcagtaagctaaattacttctcctcccacatgcataaaagcattaatttataaaacacatagccatatgtcatatctcatgtaattctattttacattccactgccgcccagacttatctaacatgaacaaatagatattatttactgtagtcagaatgagaattatctaatgccacttacatagccataaattgatttttgattaatgtttaagcaaaaagcaaacaagcccatctgctctgaaaacaaacaaacaaaaggaagcagcaaacgcatagttcacaggaatttctgcagtattactatgtttcagcggctggtgaggatggaattttttcattgctatcgtgaaaatatactgcttgacaagaagagaactgcatatatagatgcagcttcttctctagcaactgttaatttaatagactactacttatggtgaaacaaaaaacaatcccactctgaagaaagcactgaagacctataaccagyggtgaatttcttccgtattgctcagtggaaacaaaagaaagctcaaatgggtgagtttttcttctttcagggttgctttctctatggatcaaggtaagaaggaagaaaagctaggtctcctatctatctcacacagcagattttaaaatattttwaaaatattttaaatactttcaattttttaatattttaaaaacttttaaaactaactactgtatcgtgtacctatgaaatttcgttttcagtgcaattcaaaattgctaagacaaaccaataagagaagtagaaacacgaccagaaggccctgtcctgtttattggtatcatctctgaggcttcctcagtatctcgcacagtatctgtcagttgacagctctaatccgtttagagttaatttgttctgcgtctattatgcaggtaagagaaaaaaactgctgcattaggtgggaatttcactaataccaatgaattcccaatattctaactttctggggaaaaaagatgccaaaaagagtgaatgcattttcaacaaaaacagcatgttaggattgtagcacagcaggttgaaggatgaaagaatggtaagagcaatttcacagcaaccaaaatgacacaaggacacacatgccggtgagcaaacaagaggcacaacttaatgacgcaagaggaagcagtttgacttgcaactttcaaaattaaattctaaccgtggtaatataaagacagctttacatcccattcaccacgttacacatattgccatttatttgctaacagcaaaaattcaaatgagtgtacttgagtctctaaatattttctacaaacgctcacccccagactaagatagacactgccaaagtgaacgagtcactgcatggctagatttccatgttgaaaatcttaggctcatagcagaatacttgcacaaatcctactgcatctccttaaaaatcactctacaagttgcatcctaagagttcttgtcaaaattgttctttaaagcattacacacatatgcacactggcctagagaacaaggatctttgtctttctttgccaaaagacagtgtttccccaggcctgttttagccttcgactgatggttctgattttggttcagaaaaataattgcatgactgtcctaaagtggaaagagaaaaacctcaaaaattgttaacacatcaattacatcaaccttttctaattacaactctgcatttcattattctgcaggcaaaatgagtaccttaagtctagagccccaggtaaacaaagcctttccctgtcctcatttcaaaactttgtttttataaacattccccgtcccctaaactgaactacagcagcacaatgatcctgttgtgagcactgccttgacctctataggacaacagattgttgttcacttagcccctcagagttaaatcagttttaatacagaagtttctgtcttatcaaaggaagtaaagaagtaaaaacaaaaaatgaacgtatacaagcacagatttttgagcttcgattgtagagaaatggtagttatgtggcttgccaagaaagtgcatcacctacttctgcttctggggacagaggtgaaggggtctgttctggaactttctaaggaggccatcttcgttattacatcagggaagtttctagtcaaaatgttattcctgtctacagggaaaaacaaaagcaaaacacaaaagaacactgcttctaatggcatcatagcaagsagtttatctagaaagatgatgccagcagtcacctcttttccaggaagacagaaacaaaaaccgttctcctcgagaggccaacagtgtagaagccccttttccagaactttccaaggagtaggtgaacttctttgtaagtgtatcagcacaggggagagtggtgctccatgttccaaggaagaaaagcaacccacagctcctcctgcccgtgcagcagatgaccagaaagacgagaaagggaaacaaactcccaytcatggtgaggctgcttgtttctcaaacacacttttccaatgcctccacaagttgyttgtttctgtattttgaaagcactcaacatgcagagtatttgctaaccacaggcagagtacccagtcaggatgtaccaactcaaactcctccctggggcaggcaaggataaacagggaacaggtaagagaggcctaaaaagccaggtggacagagaccacatgtgaccccaaacagaaacaggctgctggaaactaactctctctctctctagctgatacttattcarcacttactgtatgtcaggtactatyctaaaaactttacgtatagtaactcagttttcacacagatgcaattattttccatactttagagatgagaacattgaggcatagagaggttaagtaatttgaccaaggaagcacagccagtaaatggcaggccaaggatttgaacccaatcagtatttttttttgtagctcatctccatggagttagttggagtctcatcagcacttcctcgtacagggctccattttactgatttctatcaaccacaggacatacttttcttttttcttcgtaccctgaagaagaaatgcactaggtaacttcaatatgatggcagtaagattgtttttcaacacatacacacacactttcaaaaaaaacttagagaccagatgcggtggctcacgcctgtaattccagcacttcgggaggctacaagcgaaaggaagtcaagaccagcctggacggccaggcgcagtgtctcacgcctgtaatcccagcactttgggaggccgaggcgggcggatcacctgaggtcaggagtttgagaccagcctggccaacatggtgaaaccccgtctctactaaaaatacaaaagttagccaggcgtggtggcacgcagctgtaatcccagctagtctactcgggaggttgaggcaggagaattgctggaacctgggagggagaggctgcagtgagctgagattgcaccactgcactccaacctcggtgacagagcaagactccacctcaaaaaaaaaaaaaaaacaaaacaaaaaacaaaaaccccgcctggacaacaaaatgagaccccatctctataaataattagccagttgtggtggcatacacctgtagtccccagccacttgggaggctgaggcaggaggactgcatgaacccaggagttggaggttgcagtgagccacgactgcactactgcgctccagccggggtgacagagtgagactccatcttaacaacttaatggtaaagcaggcctccagtacactttctcctccctgtcttttcttcttttctgaagattactacttactcaccgttccccattggtttagatgataacagaagaaacaggacactataaaaaccttattttgcaccacagaaagcaagatgtgaaggcagtcaggtttgataacagtgcgcactgtttttgcagtatctttcatcacgaggctctcacatcatgtgctctgagctcatgtaacacactctgctggaatgcccccattcaagaggggagagagtccgtgacagtcctccctgcactcactgtgctagcaaagatgtccgggaaggacagaaaagaatgtaatgtgcaattaaaacaagggagagtgattaatgtaggcaaaaattaatcacaagggcagtgtcaaagtttggtgggacaactgcgtgttcagaagacacctgaaaaaagtaatcccatgataaataacatggtaaaaagcttagattgtgccattaagttttcttaatattatggataaaatgacaacaggcaaattattttctttcccaggtgaaatgaagaaccaaggatcatctgagcaaagactcaaggaccatttgaacaaagacatccacatctataccacagatgacttggcatctatggaggagtggaggtgagcaccactctaccatgtagrggaagcagccactgtggaggctgggcttgtggagattccttctggatgccctcagatctgtcattaatggggacaaagcagaatcaagggactgctctatctcatctaccactaccagctccaccatccagggtactgttcttgccactgcatctagaaagaagaggaatgcaatcttgcagttagaaaaggctgtctcgctgaatatttattctcattcctctacccaaaactaatgaaaatgtgaagtctgagtggtgtctgaacctaatattttcgtgtccgaggcacacaaggttgagctgccacttctagccatctgaaccacccagtgtgagcatatatgtggctgggagggtgggtggtgatggtggtggtagggaggtgggggagacttctaatgagaggcagtagagagtagggtctaagagtaggtactctagagtcacactgatttcggttcaaaccccaggtctgccatttactagctgcacttccttggccaaattacttaacctttctgtgcctcaattttttgtctctaaagtggggataaatagttgtatctgtgggacaactgagtatatggcaagtgtttagaatagtacctggcatagagtaagggctgaatgagtgtcagctccagctgtcatctaggtgtaagctcactggcagcaggtgcaagattcttttggatggctaacaagctacagctttggctgacagtgctgtttgtgaaacccagtggcctcttcactccatagtcagccttccagtgctcctgcccttggtggccttggcaggagcctggggttgagtggggactcagacaactgaagctctcccagcaaaagcaggatccccacgtctcccactgacactaaaaaacaaattcttgaatttttcccgggtctgctgagtgatcacaagaggacagctggggctggatgacagagcctcagcagtgacagggaagcctgcttacttccctcatgctcagagtgccttttggccacgggcttatttcagctgtcttktgttccatttctgaggctctaaagggatgctctgggaactgggatctaggaataaatcaagatgagtggggcaaggttaataccctgattagatcagcctggcccaacgccctttgaccttagagtactggaaaagtcttgacaggcaagggcatgaaaaggtcatgtgctccaggggcactgtcttcaaagaggagccttcctggggtaaacaggcgcatctaccttctcaataacaggttcaaaattcaagaaagcaaacagcattccctaactatcaatattccactaagtcctagaatagttttagtttttaacatcccagatagcattttcaattgtaatgcctggaatgagaggcagaggatcttcagggtcacgtgctattttttatgggtttacatgaaggatgcagatgtcattttaatttttatctttctaaacatagtttggccaccatccctgctgaagaccacagtgagtccaaagaacatggttaactgaaatacacagataatcacagaaattacttttaggcaatgatgtcaactttgtcccactgatggaagaaaataaaaaagctgaaattagaaaatctaagttttttctcataaaggtgaaccccaaacctgtccaataatactctactaaataaagtctgttagtaaagaagggatgaaaaaaatcagtacctaaaagactctcaggccgtgaaaatgattttgtaaattctcaaatgggctttgcaagccaacagatccaaatcacaactgtggtcaaggcattctgcagagtctcaatgctaggtgaagaaggcatcttgggaaccagcagactgccactctctcaacattgaaaagatatctccattctttgaaagtcactttcagccacccagaaagttacctggagaaaagtatggtgaatgaaactgtttagagtttgagaaggagcaggtctttcctatgtaaaaattccaatgaataaatgacaataagatagaaaattgccattaaagcatggcagtaataattattgtagataagctccaccaaagcatgacaagatcagtgagtgacaatgtgatgagaaacaggacctyggccagttgtggttgggaggctgaggtgggaggccaggagttcgagaccagactgggcaacatagtgagtttctacaaaaaatttaaaaattggtgaaggccaggcatggtagctcatgcctgtaatcccagcactctgggaggccgaggtgggcggtcaggagatcaagaccaacctggccaacatgtgaaaccccgtctctactaaaaatacaaaaattagctgggtgtggtggtgcctgcctgtaatcccagctacttgggaggaggctgaggcaggagaactgcttgaaccagggagttggaggttgcagtgagccgagattgcgccactgcactccagtctggcgactgagcgagattctgcccaaacaaaaaaacaaacaaacaaaactggtggggcactaattagtgatggtgcacactagctacttgggaaactgagatgggaggattgctcaaacccagaagtctgaggctgcactcccctgcctgggcaacagagcaagactgtctcaaaaaaagaaaaaagaaaagaaatatgaaaaaagagaaacgagacatctrcatactgtgagtatcagccctaagatatcagtaacaatgcgaaaagcagaaaatttacactggagaaacctggcaggcaccacctcaatcaagtgttcaaggctaagagatcatcagtggtaagatgctgacatcacacagatgtgacgcactgagatgcaatgtcaatcttgtagtagtcttccccaaaatgtataaaaatgagtttaatgatgagaaacattagaaccaatttggagcattctatgcaacaacctgtccatactmttcaaaaatatcaaggtcatgaaaaacaagcaaagatagacacatttttacagactggagaagactagatatagtaagtaaacacaatgaaggatgttgggactgaaaaaggatattagtgggaaaactggtgaaattcaaatagtccatggttaacagtattgtgtcattgttaatttcttggctgtgagaattggtgtatagattatgtaaaatgctaacgttagggaaaactgggtgatattttacaaactttttttttttttttttttaaagagacagggtcttaatctgtctccaagactgttgtgcagtggcatgatcatagttcactgcagcctggaactcctggctcatgcgatcctcccacctcagcctcccaagtagctgagactacagccacgtgccaccactgctggctacttaatttctttttttttgtagagatagtctcacagcttggtctcaaactcctggctttaagagatttgtcttggtttcccagagcactgggattataggtataagccaccatgcctggatgctttttcaacttttttgtaagtctaaaattatttcaaaataaaaagctgagagagagagaaaaaaaaaaatcagttcagtttctccccggccagtggggtcatcctcactacaaagttgctggtttgggctctagctctgcggattttcctcactggacgaatttcataattgtcgctaccactgatattacacaattgagattctaactgaatggagagtgatggaagaacatgaatgaagaagtcatgctgacattggggaaagagaacttactgaaaatttttaaaatgttaaatattttacattatcttcacaatccctgtacccccaacmccttccacagcaaatctccctcaacaatacttcagtaatctggctagagyccaaaacaaatacttcttattcagaacttggctttgaagaaaatgcagccctaacaaaattttaagtaagttactgaaggatgcagaggcttcattttacaggagttagttccagaggtgattttgggaccagcattattcccagaccccaaccacatctaaagctgccaggagggtctggcttttgattcctctgtgactcctttccagactaaatcaatgtcacttggttccaacaactgcagctcttccctactctttgacctgctgtgcctaaaatttaactttcccaaattgaggagggttcatcctccttgcctgggtcaatccttggggtggacaaaaggtattaagacaactatggaagcctatccactctgtcgagagaaacaattactcctaaagaaaatctctacttaaagccacgattaaagtcactctcctcttcatccctcaacaacttgctttgaaarggtaagaagggaaagaagatgagtgcttccacttcgctggtaggggtgaatggtaggtagtcctatctgcactctttccatctagtcccctacacataatagcaacaagtgtgctagttgtatgctacagttgttgtagcctcttagcagagccttcaaatcctggtgtgtgggtgtaggtctgtgtgggaaggtgtgtgggtgtaggtttgtgtgggaaggtgtgtgggtgtaggggtgggtgtgtgtgggtgtaggggtgggtgtgtgtgggtgtaggggtgtgtgtgtgtgtgtgtgtgtgtgtgtgtagggggggtgttctcttgccctggccacctaaaaagcctaagttactactgacaaaggatcctattccttttcactcaatataagcctataagacatctcaacactcgccatcttacaaacatagagaagcatctgggtgtctgggcgtgccctggacccacaaaaatccctaaccaaaactgttagctctgacaacggtttaagcagaagtaatagcatatacctctgaaggcagaggtttggtttttattgctaggtttactcctgctcgtttataaggatgccctaaatgccatctcccaatgaaaacccttccatgtccaggggcaaaggatgctctggaccctcaatgcttgagcctactgaaccatccaggaccacttcgcttggctcgtctagtgatgcagagctgttacatggttctgcaaaggattctcagagagattcccacctcacagtcactgctttgctttcagatatttctggtaacccccagagttcagtgtctttctagcttgatttgtcccaacagaatggagccttattgaacctatggatcaattctggtgaaatgtcaaataaggcaaaataaaacagaagtaagtgtgaaggcaagagtttttaccagaatctgaccctttkgtgagataactcacgtgacggaaagctctgatgatattgctgaagctggagtgtttaatgacctccattttctcaagagcattttccctgtaaacaaagatgacaactgttacagccagagaaagtgacagcttctgaggtttccaccataaacacttgctgaggctccactgatgccaggcaccatggtgatgctggtgatctaaagacaagagtcaggcttaaaagctttgcaaactctttcccaaaaaaggtacagtctaggcaaagttcaagctgtaaacttgtaacttcaacatcagctgttacatgctccagcaatagaatggattaatttcttggggacagaggagaggatattaagggtaaagaaggattttaattaggagatgacatctggcaagtcctcataaacccagcagcacagagctggccacataaatcaaacccttgtattcagggtccatactattactcaacaagggtaattcgagtaattaccagagttatcatgatccaacacataagttcatttgaggaccctgactatgcaagcatgaatatttttttggctgcctctagatagcatgtttatgaaaaacaggttaagttactggctccaaattactttttaataaaaaaagcaaacaataaaagcttaagcttttaagatttttcttttttgtttttaacctggaaaataaatctccctgtcaaaaacatgcaaaatgaatgatttatgtgatataagcttgggtatctgtgttattattacatgacatttcctaacagcttataattgccttaaagattgttttggaaaggttataccttctccctattcccattccctttaaataaacccttgtgtaatctctggaaatttttagactacaactatcaatgggccattcaaaaatggagccattgtcaagtcacccacatgaaatagtgaaggtttacaaccaaaagagaatcgctcacttcyacaaaatagctgatggaaatactgtgctccgggggcttacgtggaacaaacattaggaaggtgtctacctgcaaacccgctctaaggctggaccaaaccagggggtccaggtcaatcacaagtactgaatcaaccaggaaagtccacagaatactgagagccatcaatgacaccactttagaatttaactgttccaaaccctttgtttggcagatggggaaaggagaggtagagggagatcagaagagtcaatacaagaatctyggctgattggctggtttttctaatatggttcattcaccacatcatgttattctattgaagttcaggagagggtaccaggggatacctcaacccaaaatgacttcttcacagttttaagtctagggggaaaggcccataatgtagtcctcaccactttttcctaggaatggctagcatcagacatgacctaaatctgtagagctagttcaacattcaggttaccaaacaaagtcatgaaagaatgtaattactatcacagacatagactgtctaggttctaaagcaattaagctggtaacgtactatttacaataaaaaaattggtttcacaaacctgtaacagagaccaggtaaatgtgccagaaattgtataaaccatggcataccttgtatcaatttttatgtagacacagcaagcaaacacagttttggaagataattcctatattccaacttagcataaggtaattaactgtgtcttaaaagaggaaaagaaaggagcctagagctttattaggtgtcccacctaacttaaatttgtttttctagaaaaaaaccatgcactcaagaaaggcaatcaagatctacatacttaattcacattcacagaaacttgtgaatatatctgtaaaaggattatcattaatccttcaagctcctagagtaggaatacaatacccgggcagtggttcaagaaatctaactcgtgagaaggttacacatctcaggggtaatctaataatgtaaacttttacaaactttccttcctggtctcttgccttcagtaggtcattcatttaaaaacataatgagctcctggaatatgctggggaccctgtggggaataaggcacttgtgattcctgcacccaagagtgtagctggggctacaggaatgttttaagacacctcttaactgtttaaccgctagtgttttaagacataattcctgccctc

SEQ ID NO: 9868 - DNA, 15042 bp, Homo sapiens
cagatgtggtaagaagctctttcagccggacttggtaaaatgccttgtttgaatcgaagtctgaattggcggttatttttaaattaataaagtttttctatttggaaggacttctaataacatagagcagtatcctaagaagcccttggggacttttttaatgaattagaataatgtgcaattagaccgacagttgtaactgagtgcttcggagggcttgaaagtagttgttctcaagtagttcacgtagcatcaagttcacagaaaggattctaaggcactgaattgctcgattttacaatgcactgggatataaatgaacaaatgcactccacagtacatattaggcattccctaggcttaaaaaacccaaaaactccaaaataggaaaaaaaaaaaaaaaaaaaccatgctcagcaaatatattaggataaatatgtatcagaaaaatattcgtttcaggattcctttaaatagtaagtccgcctcatgtctgtgtgtcttcacagatcattaatttcttggcaaagaagttggggtgcagacaccctgtggccacagcactggaactgaaggtcagtgggaacgtgatgagaggggttttgaaaagtctgcgctcctctgaaaacattctgactatgccttttctctctccacggtttcccaaggccactactctatcttcctctgtttgaatccaaacagaagtacaaggagtcagatccacaaatgagtcgttttatcttgccctacctctctgtgcagtcaatggccaaccatcctatggatggacagtcacaggggcccaaccaaggtgtcttatacgagcaggcagagggcttgcagtggctttttgtaggtttttggctggagctgaactaactgcaaactaaaaaaaaagttcccaacagcagcccttcctgaagctgacggtctgactgtggaagtttagcccgagtatttagggtgctgggaagacatgagaactamcttatgtcctttgttttcttcctaagcaaactgggcagtcttgttcatgcaaaaccactatggagtgatcactgtaacaggcacgctggaccagagggtgaatgcccccagcgggaatctctccctaaagccttgctttttcacatcacgccacctcccctcttccaaattttggaggcktactaccaataggaactcactatctgactgattaatcagctttcagtagacaggagcgggacaggtgtgggagaaaacatttctttccaactcccattctccactgcagaataccacaataagaaatcttaggccgggcgcggtggctcatgcctgtaatcccagcactttgggaggccgaggcaggtggatcatgacgtcaggagtttgagaccagcctaaccaacatggtgaaaccccatctctactaaaaatacaaaaattagccgggtgtggtggygtgcgcatgtaatcccagctactcaggaggctgaggcaggagaatcgcttgaacccggaaggcagaggttgcagtgagctgagattgcgccactgcacttccgattgttaactagcagtttaaatgaccacatttaatcagctaagtgagagttggtttaaaaggccaattacaaaagaagtggtaaatggccttttaaaccaattcatagtatctccaaatgccttggtttaccaagtctgagggtttcctagaactctccttataagcattagaatgaaatctagtcctggctcttttcccatraccacttcctctttggttcattaagaatataaacattacttaaatagagcaaagctccctgagctaaggggtcttcatggtatacattcaaacggcatgtgracgaggttacagggcatagtgcagaatccctcctcggattccaaggtggctaaaaatgcctatgtcagtggatttgcctgttttccaagtcatttgctctgaaactcctaaatacaaatatgaaaacaacagcatgagacttcattgtcatgtttatttgttattcattctctgattcggagttggggggcaggggaaggattagacacaattttaagccaaccagcctctaaacagaaatatggtttattctcggtactcaaattcaaatcttagtaacatagcaattacattttaaaataaactatctccttgtgcttgcttctaaggagagtgtttagtrggatatgaaaagagtctaatcctaggcagccgtatggccagaccaattataaaccccgtagacttttcacacgtcacagagagcaaactgctccaggagcagctcttaatactttaytgcctattcaggtgcacctgcacttttaagatatacttgtcagcaacaaaatacagcacttycctctgtctttatcacattggttgccagacaactgcacagagctaaagtaggtaatgttacagtaaacagctccctaaaacatttacatatgtcactgataaacaatagaaaatttaaaagagatacaaatgtactcttrgaaccttaaatcttcttcccactgaggcctaagaacttaaaatcttcatacacctggctgagaaaaaggaaacaaattccaaaggaagtctagatttatagcctaaatatgtcttcctctagaatatttaatacacttaagctttagtcattctatacactttgaaaatgcccttcaaygataaattacagtcgttgcatttttcattgcagttcacttaaatatcattttgctttcaggaaaacaattataggacagtaaatcacttttacattgcattccaaaaatatttaagttgcaacatggrcaatgtgtagaatcacaagaaaaatacagcttatatattctatcattcagtcttctacagcaaacgttaaatccctgaggaaagtcctaccgttagtttggtttttaaatatttagattatttcarcgtatgcacataagtattagtgcaacaaatatttactgaactcccgcaatatgcagtcatccagatttggggtagaaatttgggaatccccctgatttcaagatatcaaccactactaccataattacctgcttcatgggcatttaacatggcaggccccagcctaacaactctacacacacagactataccatttcatccccacaactttcctgagaggtggagatcatcattctgattgaaaagtatggaaaggtcaccaaggccacatggctggtgacactggaggatctgcccaacattcacacccataggggtgatcagtatagcatgccctccatatctgagggctccacacccatggattcaaccaactgcagatcaaaaatattcaggaaaaaaaataggatgcttgtgtattaaacatgtatggacttttctccttgtcattattccctaataatacatgataacaactatttacattgtattaggtgttataagtaatctacagatggtctaacgtagtggtccccaacctttttggcaccagggatcggttccgtagaagacaatttttccacagatgggtgggggagagggatggttttgggatgaaactgttccacctcagatcatcaggcattactgagattccctgcatgttcagttcacaatagggttctcactcctatgagaatctaggacctctgctgatctgacaggaggcggagctcatgcagttaatgctagttggcctgccactcacctcctgctgtgcagcctggttcctaacaggccatggaccgggactggtctgtggcccaggggttggggatccctggtttaaagtatacggaaagatgagcatgggctatacacaaatatcacaccattttataaaagggacttgagcatctgtggattttggtatctgttggggtggtcccagattttggtatctgttgggaggtaccagttttctcagggaaaactgtatatggtgccactaatatggtgccactgtatatggtgccactgtatatggtcttctaagctatgccaagtttgtaaaattaaagaacaaaacaaccgggcatggtggctcatgcctgtaatcccagcactttgggaggtcaaggcaggtggatcacttgaggtcaggagttcgacctgacctcctggccaacatggtgaaactccgattctactaaaaatacaaaaattagccaggtgtgatggcgcgtgcctgtaatcccagctactagggaggctgaggcaggagaatcgcttgaacccggaaggcagaggttgcagtgagccgagattgtgccagtacactccagcatgggtgacagagcgagaatccgtttcaaaaaaaaaaaagaagaagaaaagttaaaaaataaagaacgaaacagcgtaatagrtgatcaagtcttagragagtgactgcagactacaactgcaacagagtgtttaggaaaaaatagatgttagctagtragtgatgatcaaggaaaaagcatgggaaagaatgccgagcaagtgggagaacacatgagtaacagcagtggggtgggagacaagggcccagccttttggcagaaccttcagaaaaccagcctaatggcccatgcctctggaaagcagcaagaagataagccaaggtgtcctgggggaaagctgagtctaatggttaggacttcacatcacagagaacagggagccaccatggtattttgaacatatgagtaccttacctaaacgagttatttagataaraagaagtctgacaataatttacaggatgtattggagggaaggaaaagctgaaggtgagaccgaaccatgaggctgcaccagagaaaaggcactgggactgaaagagcagaggaaaacataaagggcatttcagaagagtgaaagagatagggaggaaagttcctgagttctgcctaattatgtgagccgttcaatactcaccagcaagtgaggagaggaaccaggtggccgtgcacacagggatgtgcatttgctctcttcracctggggagaacgggcagccctgtcaatattctccactcctgtataggctgctgtcaaccagtcagccccgagaatgacaatacttccatgttaccctccctagttcygagtgctggctatgcgacaaacatatttttaatgagaaaaactatttttgtttcagttttgtttgaaccacatcattcacaaatgactgagtataagaaacaacacaattccaaaaataatgttgcttaattttaggatgtctagtctttttttccccctctttctctctcagaatatgcctgaaaatagtggttagccaagtttttgtttgtttttgtggtggctgttttgtttatttaaaccagggtgagaaatattttctgggagttttaactactggatcacaaacagaaaatgggggtggcagctatgcaaaaacccctatgatcatgaaaccaagaagttatggttactaagcactgtgaatttaacaggagcttaaaatcatggctctgacacctggaaagatgccactgggctcagaccagccctgtgcagctcacaacttcaactggaatcaaacctgaccatatccccacttctcacttaaaaagaaatggttttggccrtactggtagagcaaaaccagaaaatagactttgaattagtcttcatgctttgcaaaaaggtactaacttgttaagatgcatcctccatgtctaactaagcctggtctaataactgttttgcatctgtcctctagcagtctgctgctgattggtggtgggaggggaagagggaaacagcttaaaccaktactcctgttttgtgggcatttgaagtagctgccaggcacatgacaccactgctccaattggttcagagtgacatcacytcatgattcaactktgtttgcatttcggcttcctcctttccaaggggttctcaacttcaccctgccaagtcactttcaaacagaaagagagaggaacagcacatcttatgtagtcatgaagtgtcaaatgtcctttgtgtttcttagcccagtttatgagaggagacctggagaaataaaggtttcaatcaacaccacaatggtgtatgactttcttcacagcatgaggtggggggaacgggaagaaaagcaaaaggtggctgctaagctttgagtaagttaaaactgatggacttcaataaaaatcctcaaagtttgttttcaagtgggaaaactctaaaatagaaaccacatgcaatactatgctggaacctcatttaaatcattcacgcttctaagactcagagaatgtttctaatttagtcaaacactaccctctctttctccaaaataattattcttaatttatttcacctaacttctgttttttacatcttagcaatgtgaccaccaraagctggagcaactgctttctgattcagaaaataaaagtttattctgatttttatttctgtcttccatacagtcagttaccagggaactcacaaaatttggagagttcgagcacgattaattttgtgtgttcagctcaaaggaaaaagcttcctcataggagaaatgcatkaatggatgagcgaatgaataasargctttataacccaaccaaccagaagccgaggggctcactatattaaattataccagctctcaatacaatgggtcaaaatgtattttattttaaattctaagttaggctccaaactttacatcgggaccttgtaagacgagatcttttatcatgctagacttttaytatcccctaggaaatgtagtgacattaaccaaacacacaaagccatctcaagcctaaaaatgcctattactccaatcctgtactcacttgctccctgccagagayaacayaaagagatgagtatacacactcaggaaaacttygcccgggccttcsaggtagggcsaggactgtgcaccacacgagatgacttgaaaacctgtaggaaggytgtatctcagtgccacttgctttgaggagactcactgggtaactgtttgagggtggctctaatgctctgcaacagtccctgcagggacaaagagaaatttccatctttctgaaggcctaacatctcttttcttgtaatctcattgacttgccttgcctagactcaccagtcaattattatttatcatttacagagtagctcatattgacaacatacctacaagtattttagcacttcatataccttttatggtataagtacctgtggaagggaaagggaaatgagttggcctggagtgggaattaagaagccatcatgaatatacatgtgcctgtgtgtgtgtgtgcacacatacacccgtgtgtctctccacgtctgaggccagcagctaattcctgctcacctttcaacacttctagtcttggctcctgagccccaggtactctattcctgaagatccttgcagatatcaatcatcccaagaatgggctagtggtttccgggtttcatraataaagctgtcccattctcatcactaatcaaggtaagagagttacatcttatttctctgccttggtttcatcatctatggaagagcagtcatactggatctcgaaacatgcattttagtgcatcatgcacatttaacgcctccctcacgcatcactcaactgactggcaagccaccccttccccttcgactctcttccaaaaatgcttacgaacttgaaatccagcaraaaaggggccacagtgactacgtactcatgattctgttttactcttctaaattcacggtctacttactattaacttatatacacgttaatatttaagttccagatccaagggaggtaagaagcagctaattctagggaggcagggctagagagagtgatggtaaaatcagtttaaaaaggggggggggaggcgtgtttaaaataaaagacaactataaaaaatcaacagaggaagggaaaaaccagaagcgcacaggccatttagcgcaatgtagcgcgtctcacaccagaagttgtttacacactcttggacgcctgagttctccttgayttttgtttttcttcattttatctatcttcgtttatccatcttctagttcatctacttaaccttcttgtaactcagtgctgccaagtggattcggcatcagcatttacataaaaaacacattgcaagcaaactgcattactctagctgttgtacaccaaaaagaaaagacacatttaacatataaatatgtgttcacataccaagtgaagaccaatttatgttgtggtacttccgtgaactggggccttgcgatacttaaagaaaaaattcaattgtgatgtcaaagagaggtgttccgtaattcaaacgtactcaggccttcgaggtcagtttattcacattctgagcagtggtttacttttagcaaaatattacccatgtcattaaattaatatttgggtttgaatctttttgttttakatgcacttaatgtgtaaaatcatttaacttacagttgtaaaagatctgcaagcgtaaaaaattgacacctaggccttataaggctgtaggtatttaagtatctttataccaagtaatttataatgacactgagggtctgtgaatttatcttttgcttttaaaaggtgtctcaattaccttagatgaaaaactgccttgcccacctgggagcatcattatcttatcatagaatgaagttactttcacagtgatgaccctgagtattgasaaaaagttggattatgttcattatattctttttaatgcaagcaatgtaaaacgtcctttakaaatgtttcctttaaaaattatttaaattgtattgcttaaaaaatatgactctttcaactcagttatcacttaaggtttcctggaatattctgctgtttagaacatatttgtaggatatgaaattacctacgtatgtgactcttataagaccagagaaaaaggctagaattatatatatatatatatgaaaatagcrtcagcaattccacaaggccatcaacttggggtatgaactatccgtgaaggactagtgatggctgaacttcaaccacactctgaacagcataaaaatgagaaaactgtactccttgatctttagttctcaaagtgtggtttgtgaacgcgtaaggattctgcagctttttcagggggtctatgagattaaactattttcatacactactaagacactgtttacctttttaactcttattgtctcatgaatgtgtgccgtggaagtttccagaagctgtgtgatattggcagcagaataaacatagaagcaggtatgatcatccaattgccttctgttaagccagagattaaacacataaaacaatgccactctattcatatactggggtgggatatagtttttatccaacataaaagtacgttaacgcatattaagttttgttactgtttctgaatcaataaatctttttaaagttattaattttaattcttcatacagcaagtatcaatggatacaacccacataaacgaaagcttattggcgtttgtcctagcctgtctgggcacctataacaaaacaccttaaactaggtagcttttaaacaacagaaacttattccttacagttctagagtctgggaagtccaagatcaaggcactggcagattcagtgtcttgtgagggctccactttctggttcacggagggcaccttctagcagaagaggcaaagcagctctcttttataaaggcacaatctcattcataaaggtcccccaccctcacgatttaatcccttcctaaaggccccagctcctaatatcatcacatggtgattaggtttcaatgcatagattactggggcaacataaacatgtagacagtggcagggttttccatttttaacagtgtgaaggggtccagagaccactgaatttgaaaacccctggatgatttcatttttctcgacagggaagctacaagtagatgagtgccaaatgtttctctccattcctggcctgtcccctgagccctacactgctgtgttcaactccatcttagcttgccccccctggatgtctgaggcatttctgacctgagagatgcaagacagagctcctgycccatctgccttctccaccacacacttcccaaactacrctgctcctccctccccactcctttgcagctcaggaatggaagcctccaccccctgttctgtccaagccaaaatgtctcagaggtatctttcactctcccagtctccattcccttcaggctatattttacaagtcttcaaatattcctaaatctatccactrcaaattgctatgactctggtccagtggttctcaacagggtacaattttggtctccccaccccctaatcccaggttaacatctgtcaatgtctagatacatttttgattgtcatgactagggggcggggtgggtgggcttctggcatctagcaggtagagactagtgaagctgctgaacattttgcaatacacaggacagccccccacaactaattwtctcacccaaaatgccaacagtgccaatgctgagaaacctggcactggttcaggactgcacccctaccccccgccctgccactccccaactaattatytcacccaaaaygtcaatactgccaatgctgagaaacccagcactggttcaagccaccaacatctctcatatgcacggtcccagcagcttcctaagcggtctccctgctttttccactattcctccttctccccttctccacccagcagctagactgactgttgtagaaatcagtgtgccactcttgtgcttctcactcatccccaacttccactgtgtattgagtaaattctcactcttgccatggcctacagaccctctctgctctggtcccatctaatactgtgacccatcttataactcgacgctatgaaatcaattgtgtctcayccccggccacctcccacctccaccctgccaattcatatgtaggaaccctaacccctcatgtgactctgttgaaggtagggctgttaaggagacaattaagatcaaatgaggtcataagggtgagaccctgatacaattggattaatgtccttaatcagtgaagagacaccacagcttgctctctcccaccactatrtgaggatacagtgagaaggtagctgtttgcaaaccaggaagagagccctcactagaaccagaccttgttgacacctgaccttggactttcagcatccagaaccatgagaatatgcttctccaaccatgacgctggagagaagaggtgaagtaggcagaggcaagactgggaaagtagggctggggtggtcagaaagggcaaatcacgaaatgtctggtgtgaaaggagaaagggatctccccagagcttgagtatggaagactattcaacttcagaaatgaacacagagagggagagggaatgctgcaatgtctattgtttaagccacccaggctacagtaatttgtcaaagcagcctgagctgacaatcactctcagtttccctcatcttccaagttccagccttgctggtcatcagtctgtgcccatgtgacagctttttcttcttatcctttctcctgaacttcccatggctggaccttccaatctcccttagtctaaatgccaccttttcacagaggcctcaatgactacccagcgtaatacagcacccctcaaccacacctggcccccaacccagcactcctgcattgtgatgacagtactgttttgtgttttcttcttagatgctcatcactagcttattattctctttactgtgcatcctaccatccccaccccagtattcttactattattattattattattattattattattattatttttgagacagattctcgctctgctgcccagtctggagtgcagtggcatgatctccactcactgcaacctctgcctcccgggttcaagccattctcctgcttcagactcccgagtagctgggattacaagcatgggccaccacacccagctaattttgtatttttagtagagacggggtttcaccatgttggccaggctgttcttgaactcctgacctcaggtgatccgcctgtcttggcctcccaaagtgctgggattacaggtgtgagccaccacacgcagcattgaagaaatcttttctgtcttgatcactgctggagcagacagagcaccacagctgcctaatgtttgttaaattaataaataagtgaatgaacctggctttgaggatctcagatccatacaaccgggcatttatagccattctctgagtcaggcagctttctggagccacatggttatgagaatgtgccttgccccaagattcatctccctctcccacctccccaaagaaagctgccatgtttgtggcaatctcatattcctctggggaccacatgggacaggaaggagtaattaactgcaatatccacagcgagtagctattcatattcttacactccagggagcatcaagtcttaaggttacattaaaacacaggcacaagggaagtccccagtgtttattatctgcagctacagagtgggtaaggatgagatctggtcacttcaattgaatttacaggcaacttctcaagagcccaactttgaactgcccaaagaaaacacaggcaagtcctactggcacaagagaatggggtgggccgatggggagtgatggccggctagggttgacatttgttttttccaccatattcaacacaggcaagtgctttcgaattactggctccctgaaaagggggatctggacacatatggcaatgcgatgaatgatgattcctggaaagaaaaatgyttaatgaaacaagaaactcacaatttcctgagacctgatatgcacaaggtactgggcagatcttgtagttattgatgggaatttcagagaaaggcctgatgaggcaaagctggctgctggaacctcaaagagacaggaaaacaaggatgagacccatgattagggccactgtgaagactccagaagcttctgaggttcgagagaagaggtgaagtaggcagaggcaagactgggaaagtagggtggctggggtggcctgaaagggcagatcacaaaatggctggtgtcaaaggagaaagggacctccccacagcttgagtatggaagactgttgagcttcagaaatgaacacagggaaggagaaggaatgctrcaaatattttaccatattgacttttaattagttgagaatcaatgtaacaggtctagacctcatccagggtggaggcagcatgtgggcaatggtaccaagaaagcatcagaaagaagaagggcttggaaggcaactacagaacaggctgccccacaycaaacttaggtagaataagactcacttccattgttccttctctagccaaagctagagaagctctgaatttctctgcatttcgaaaacactccaacacrcagagtcacacaaaactctcctttggaccagatggaccctatcctacgcactgagagatttggagtgaatgggacaagaggtaagcccagtctctttcctccctccctcatcaccccccacacctaacctcttccaaaaacatcaaatattttcttccataaataattgcaataggatgccatagcttttcccaaacaaacaatagcctgattgtgccctgtttgcatgggcccagcccggcatacacaaaggcctgctttcatgcgccaggcctctccccactgtagaaggatgggcatatttcgccctcctcacttcttcaacaacttcactgaggcaattccattcggaaaggagcaacaggaagaggttgttaccaccaggaataggagcaactcccattaaaaagacagccattgttccccaggttttctgttgcctttcgacctcatccagaaagttctttcaccagaagagagctggtttgccccaagagccaaatgacaacatcttatgctggtgatttcttttaaactttttattaaatttcgaatatgattttaaattgtaatcactgactgaaaatattcctgtttttatgtcatgtatcttcttaacagtatcagaatagagctaaaacaaacgcataaatttttgtactactaattatttttctggtaagaaaaaaagctgaactaaaagattaaactaacaactttataactgctactctgaaaaaatatccttttgtgtttaaaaacatgaagtattaagtttcctttcagaatgtaagtttgattttcccccacagatataaggaagcatcatagcaagtcttcttcctgtttccagtaattcggaatggccattctcccaggtagagccacgcttatatcagatacartttcttctccccatttttggtcttccattcatttctctttcactcttctaatttaagtgaaatggaattccaaatggccaagacactaataagctctctgaaagccatcttgagagcatatacatttttgtttttaaaaccatataaacaggctgggcacagtggctcacacgtgtaatcccagcactttggaaggccaaggtgggaggatcacttgaggccagaagtctgagactaaccccggcaacacggtgagacccccatctctacaaaaaatttaaaaattagctgggcatagtggcacatacctgtagtagtcccagctactcaggaggttgaggatcgcttaagcccaggagtttgaggttgcagtgagctatgatggtgccactgcactccagcctgggcaacagagcaagaccctgtggctatatccatccatccatccatccatccaaatcatataagggcaccgaaagcagtgctacacagggcattaaaaaaagctttcactgcctggtaagtgttgctccaaagtgatgtatcattcatgccagaaagagtaacttaaattaaaatgtattttaaagttgaatcttggttttgcaacaggatctagtgacgcaagcaacccacgatgatgtgctccatttgctatgt

SEQ ID NO: 9869 - DNA, 20026 bp, Homo sapiens
tgccaggctatcccacgtacctttcccaaacaattcccaaacaacatggatgtggtatctgtgtgtcctcacaacttcattactgcacagaaatagtacctcaccaccaaaaaatcatgttcattggaactgttctcagaaaaaactccaatcataaggcaatgttttataatgagagtttatggatcagatattctgactaaattcaccaaaatgatttcagaaggaaaattactattatcttacagctgctattgtttcctctaaacttatactatgtcagacagaaaatccgactgcttgaaagaaggacccataaacggcaaggagacagggtatacactaatgacaacaaagctatgacaaaagtgaagtggcttccacatacacagtgtttcactatggcccaggccctgctgtaaactcctcacagggattagctcatttaaacctcacagcacaacaatccctcactattaatgccatcttacagagagtgaaacagaggcatgagtctcaaaaatggcagcacaaggataaaatcccatctggctgctgagtggatgttttggtccttatcctatctcagagaatgcattcaaacctaaaactatgccaggagtctaaatttaactcaaacaagctgaagaaaaccaaaacgtctcagatatcacaaagcagtgcatttattgcataatgttgcacaacaaggaaagtttctagaaagctgcccgaacttacatggttactaccaacatccaagcaaaagaaagtcccaaaggacaaagaacgtgtcccacatgtacacgatctggttcatctattcatatatccaggatgcagcctgtgctcagcgccctacttacaggaatctgagctttacgattagtatgattttagctgctaaaaatgtgacacctacctctaagtcatttggatttataaaaatcccaccatgctacaatcaagaaagcatttcactgagcaactgtaagccaggtacagggcrtgagctgaagaatgtcccaggtgagtgaggccgttctaatttcaacacctaaagaacaggtcacatcagacgttataaattctccaattttcttttcttttttttcttttgagacggggtttcaccatgttgcccaggttggtcttgaactcctgacctcaagtgatctatccacctcggcctcccaacgtgctgggattacaggtgtgagccaccgcgcctgaccaattctccaattttcatgacattaatgatcacgttaggcttagggtcagctgtgccctaaagctctcacatcaatgttttatggatgtatgggcctaacactggtatacagatacccttggctatatccctcttactaatgccagagaacgggtgtttcttgccacagtgccactcctggctgtccagcacatgttcacaaggactaggaaaaagggatctctccctggcagtcagcttctcttttcacagtgttgaaaactctgtgagataatttccttaggcgtcctggtaacacctattagaaagtgtttatttaatatttattcccacaaataccaatgagagagagagtctcctactattcaacagttttttgttttttttttttaatcaagaaatagttgaaaaggatgggagtgaaggcactttaagcccacagatgccagcagaggtgggacatgacaagkgaggctggggggctggccccaaactkgtccctcccaagtcagcttggacaccacacagcacttcgtgcgccctcggctggcttagcacatggacaaggcattgccgctggagtcccaccttcttagagactcctgaaaaggagctccacgccaccccccacacctcgccctgtgccactcttccacttgtcctgtccactctggacatagagccttcacggtaaaccagtaataggacgtcaactactttctggaattttgtgagcccaggtgagtgaggccgttctaatttcaacatctacagaagttatcaagtttcaggtttaataacctagcaagttatcagacctgaaagcaaggggcctggcaacaaactctcaacctttcaggcaagtcagacagaagtgtgggcaccccatacctgctactcgcatctgcagcaagggcagactcgtgggactgaaccctcatccctgtggagtctgtgctaactccaggtggtgagtgtcagaactgcactgaattgtaaggcccccagttggtgtctggagagttagasaactggttgttggtatggcaaaaccccacacatttggcgtcagaaatgttatgagtagcaacagttcagagtcctttatgtgcgtttacaaaagcaataatttatggcaaggacttatcagaactactttacgattttattttagtttcttttaaggaccaagattaaagatttaattagttaaacaagacaaccaaaacaaatacttcctcctgaccttgagttatcacagactgccacccaaggggcaactgaaacagaaagggtggcctgcatttcagaagggctggaggggacaacgggcagtgtgctctcaggtgctctgaatcacacacacacacacacaccatacacacacaggcacccttttggaacagacaattatgaaagcacattaaaacgcagcatgccatttggaagtctggtcttgctgctctgcccaaacacagggtacacacttcagggaaaacaatcctagagaaacagtagctctgtgaaaaatgagaaatgtaaaatgtttcggccaaacacaaagaaaaaaaaaatcagcgtgtgggatggggaggagaataagacctatcagaattctttttgcttagctggccaactctggcagcataaagtttaaatggaagtatcttcaaattaaatcgcacctgcatgtatataagactcccctgtaatgctccgataacacctcaagattgaggtcatctaaattcaaaccttaaatataaaaccactcccaaaagagaatgcctttgaatataatggcagtttcaaactttggcaaataattatcctgtwcttcttatctgtgagaatctatcatttattttaaaaattctctgcagcggccgggagtggcggctcatgcctgtaatcccagcactttgggaggccaaggcaggaggatcacctgaggtcaggagttcaagaccagcctggccaacatggtgaaaccctgtctctactaaaaattcaaaaaattagccaggcgtggtggtgcacgcctgcagttccagctactcgggaggctgaggcagaattgcttgaactggggatgtggaggttgcagtgagccgagattgcacaattgcactccagcgaaactccatcttaaaaaacaataattatctgcagctccctgtatcttccagtaaacggattagcaggtattttctgagtgtccatgatgacggtcttagcactctccttcctgcctaaggagtcacaatcgcattcacaatcaaatgcaggtgctgtgtgtgcgctgctctcttcctcccatagccccgtttcactttctctggagtgcatccccatcctctcaaagcagaatcaacaagcaaaccactgtccttctttcaaaaaacaaaaacaaaaacaaaaacaaaagtcatgtgtttatttcttcccctctacttgtgcctcctaaattccttgccttagtcccaaatcagtcctccaaacgcgggttacttgtaacgttattcagaagtggaagattaccttgcaaaatggcagataatgccccaactagatatttcatggcattctaaaactacataaaagcaagatttcttaacattcctctaaataaataatagtgtaataaatatatgaaacaggctatgcatttcctcagtgttcttccattccctccagtgaccacacatgtgtactgcatggtgagcccatgactgaggaatagaaatacagtcatgaggcagctaacagcgtttcaaagatgaagtgcatatacgatagtggtcctgtaaggatagaatatagctagaaaattcctattgcctagtgacattgcaaccgtggtaagatgtacatgttcctcatatgtttgtggggatgctggtgcaaacaaacccgtgctgccagctgtataaaagtacagcacgtacaacagtgcacagtacataatatgtgataatgataataagtgactatgttattggtttatgtatttactatactttttatagttatttaagagtgtacaccttctacttattaaaaaagttaactgtggccaggcgccgtggctcatgcctgtaatcccagtgctttgggaggccgaggcgggtggatcacttaaggtcaggagtttgagatcagcctgggcaacatggtgaaacctcatccctactacaaacacaaaaattagtcagscatggtggtgtgtgcgtctagtcccggctactcaggaggctgaggtaagaggatcgcttgagccttggcggtcgaggctgcagtgagctgtgattgcaccactgcactccagcctgggggacagagcaagaccctatctcataaataaataaataaataaataaataaataaataaataaataaaatgtaatattcactaagtgtagcctaagtgtacagtatttatccaggccttcacaattactcaccactgactcactgactcacccagagcaacttctggtcctgcaagcctgactcctagtaagtgccctatacaggtgtaccatttttttatcttttacactatattttttactgcaccttatctatgcttagattcagaaatacttaccactgtgttaccattgcctacagcgttcagaacagcaacatgctccacgggtttgcagcctacgagcaacaggctataccatggaccctaggtgtgtagtaggctgtatcaactaagtttgtgaaagtacgctgtatgatgctggcataatgataaaatccaattacctaacaatgcatttctcagaacatatccctgtcattaagcaacatatgactgtctattactgagatctgtacatttttaattaccttcatgttactgaatccagctttaaaaaaacagcaggaaaccattttttcactgtgtttcaagtcagctacaatttaaatatcattagttcggtgtcaacctaaaatggaaacaattaccagtagaacattacatattacgtttacttttcatttttggtagcacaattcctatctaggaaaacataataagtttcctgtaggaaaagtaagataaaggaattaagaattcttaggggtctcactcacttaagaccgytaatatatgagaaaaaatatcttgtgctttgagaagtaagcttcaattacctgggaaatcaactcaagcaaaaaactctttcaatgatgctagacaaataaaatgcacaggtagatgtttgcacgtccacagaaattgcagccacaatcagatgcattcttcagatgtgaattcgtgcatacaagcaacccctgtctttcgcagagttaagttcaaatcctgtacacactttgttccacaaaattgctgttggcttgcatctcttttgtcacctttctccatccttaagtcctccaaggttctctcagggccaagactgtagggttcaatgaccttccctggtcagctgtaaaactagggctagcaccttcagaatccgccagccacaccctgctccagctcaccaccatgagttttctctcatcagcctccaaagtccaagccatcgctacatctcagagatgacgtacaacatgtgcctttattttatactctcaakatgctggatatagtagttattatccagaaagaatgacttcacaatcaggatccgagactggctataaacagtgatcgaatcctcaactcattccctctcgcacctacaggaaggtattaacaactgatcctccctttcatttttagagtaacaaacccagcttgtactacccatgcctacaacagcccagatgtggcactcaaggttgaaaaggggccayaacttggtaacgggacacacatgaccccatgcaggagaacagccagggccatgaggaaagggactttggtgcacaatggcaggtacctatgcccttgctgggacatggggcatcagggtcattaccagatgggtttacaaaacaccaaaacacggacagcaaaagtaagatgctcagtccattggcttgcagtgtttcagagtccctgcttgctgctagccacggggatgggggctgggagtcatcctgtttaaaagctgcagkgaaaacccagtgtggtcgtctctgttctcaatgtctaccttggaagagggagttcttaacctctgtggcagagcaacctgaaaacagaattatactccatayacatagctacaatgcctcatgcagaatgctcttcccaaaacygtgctcaaggatacaaacccaggctgtccaatttggggaaatcattktttgagggtggcacagacaagcagtcggcttggggtttgctccctgtgcacagctcgatcatcaaggaaaggcctcttccgggcctcaaagctccctttgtgaggaatgaggcccactgtcgaggctcacacaggcagctgtaaycaggctgcccctctctctgggtgtttgttttgatagaggttcatttatgccagagacaatgcccgctctctttgttctgcccccagcaggaagcagtgcagggagggggaccagcattgtcacacagcttccaattcaggttttggtggccacaacaatggggcctcaagggccacaaataaagagccgctcacggggagcagggcagagagactggcacatgtggaccccagcacaccccaggtagaagtcacctcctaacaagtgctcaggctcactatcaagggctttgagggctctgaggttggggagagggaggccacctcctcttctcttaagtggtgctgggagggagaagtaagcaaggtccccggggatgacaaagccttcctacctctcctaccatttatcccaactaaaggagcaaacactcaaaaaagcaagcaaaaagaatgcacacacatgcttcgtgttctaacttaccaacagttgcacaaggaagaaaaaaagtctaatctgaattgccaaaaatgaacaatatcctttaaaatgaagcctgggctagatggctgcaagtgaatgaaatgtattacccaactgctgctgtaacacaagccctctcctcccccttctgggcctcattcataaaaagcctgcttcgccccagcagctgcaggaactgggactggatttgtgttttgtgccggtgttttccaagacagagggaaacaattgaaacagacaatcgctcagataccaacaccaagttcgcctccccttgagaagtttgctgcagtctcctggtctaatccaaataggyggagggagggctgggagggcatcctgcagagctgttcagtggcggttctaacgctaacacccagcgtgttattaaaggaattcccatctgctgagtcacactccgtatctttcactccctgacattttatttttttttaatcaaaggttgttctttgttggtaaaacgggggttgccaagttaattaaagattgccaaattggggtagagatagcaacacaactcccaaagaggtaattttttcattgtccacttttaaatggatattaccatctacagactttatgcagcctgctagaaatcttatgagataaggaacaacttcaattcttaatatatttttctaatttatgaataaaccaacaaccaacatgcttcatccaggcaggatgaagcactgtctccctcgcccacacccttttccacagctgccctcccagcccagcatcttttatcacctagaagggccaaggaggctggtttgtgcaactcaacaagctctgtaaaacaccaagtccctagaaatctcagaaatcaccatgagaaacgagaggctaccaaactttttagactcagcagccttcttcaaagcagggcccaaatacaagagcatgttctaatttaccaggaatggttttaatacaagaattacataagaacagagtgcaggaaaggaagggagaaataaaaccattcttgttgccctaataccagagcagtcttccggtgaattgatacataaattctctccagagacaagataatccaagctattaactgttcccctctcaactcttgcaaaacacaaggcttcgaaaccttgaaggggggcaggtggaggggaaagcctgctatatatttctagaaaataccaaatttaacaccacgatcccagcctgctcatcactgctggggatcagccattctgggaaggtaacagcagccctcagcactcccctccgctaagtaaacactcctttctaccacactcggtcccccatgccggccgcctcccacctctgcctgtggactgacagccgaggaaacaagaaaacaagctggagataccaaatgaatcttgcgaaatacatggtctgtgattaaatcacaataactctaacctcctcaaaggcaaacatatcaagatagcaagctgagagcaaaataagcaagtcttaacagaaattatgccaagctttataaagggattacccacacctcctagaggctgtgcagcctggaatccagggtggtttgggttttttttttttaaacttactgcagcccttctagctatccaatgaaagctcttacaaagaaaccttcaggtctgcagttctctgtgggttttctatgaatatgaacgtactttacgggtggagaaaacatatccatgatcatgtttgaggggctcacgaaagggggaggcacatgaattataccatgaatacagatataatgaatacagatttagtgagattttaatacctcaatattctctggtcccactcttaaacatcgcccttcaaccatcaaaacatcttaaatcctggggtaggggcatagttacccaaagttgtggtaccttccctaaagaaaactgaaatacataccaggacacacataattctgtcaagtttgtccctaactgtgtgatcttggacaagttagctaacctctctgtgcctcagtttcttcatttataacatggctctaatagcagaacgaacccttgagaggctgttgcaacagctggtacacagtaagtgctcaataaatattcgttgctgttattaacattgtccctatgccatctcaccccccatataagctctctgctaactttccaacacagagaacaaaatccaaattcttcaccatggctccagggccmatgtgatctaatagccctctctgcctgtcactcaccaggctccagccacccaacctcatctcatcctcctcactggacatcccacgtgcatcctgtgtgcaccagacagtcttgctggtgcttccagactctgactacttctctccactgaccatctccaccatcctggtctaaggttcatcttctctgccctacactggggcaacagcctactcctactggtctctctacttctgtccttgcccttacagtctctcttaacgcagctgccagcatggtcctgttaacgtacacaccagctccaaactctgccatctcctttcagagtcaaagccgaagtcctcaccgtggcctccagggccctacataactgactcagtttaccccatcccccaccaagatgcaccaagctctccaagctcctcgcctttcccytccctttcctttaggtcttcgtccaaatgtcacctctctagagaccttctctgaataccctacgtaaaaaggtacccggatacctgcctggcaccacgtaccctgtaccccacacctaacatgtgacccagccctcccatccccttccctactttaataaaagctccacagaggcagaggcctcattttgtccacttctataaccctgacaccaggaacagtgcctggcacacagcaggtgctcaataatatttgtggagcgaataatcgatgccatcatggagatctttccctcgctggggcctaccacctcatgttcctctccacgtcttctcatggctgattcacagtggcagggcaaatgtcccctcttcagaaaggccttctatgagaatccaacttaaaagtctccatcacaatcagtgagtctgtatttttttcatagcacttaccactgtctgacattattttctgtctacttgtttgttgtctgtttctaccactagaatgtttccatttgttttccatttggagaatggagttggctttgtctctgtaaccccaagtagctacgtcagcacaacagaatgctcagtccgtatttgttgaataaatggcaatgtatatactgacattctttaaaaactaaaagcacacatccagaagaggaaccgggagggctctgtcttaccccagatgacacataccctgcaggtgcatgtgcatggaatgccttgggcacctgaaaacaccaccccgctcccccaaccccaaatgaagagctctccatctgacctgggagaagcactcagaacctagacatggctccgacgcaaagaaaaacaatttgaagttactaaataacagcccaacatctgtcaccacatatgaacaactctatgcacaggtaacggtccactcgccatgctcactgtccaaacacccgggcatcaggtttaccttccccctgagtgggctttcgagcagtcatcacagctgcctgggagacacagctctaaaacggggctcgggctgcagcccaggggccaacactgagctcccaaagctttggatgcatttcctactcagcatggacatcaggtgacttccttaagaggaaaaatcaccccgcaagactgctgagaaagcaggtgtggcatttatcagtgctgctgtcatccatagagaagccaggaacaacgaaatgtaactctgtgtacacagaactctgccaccccacacagrgcagatggggcagccatcagaaatgcggggcatggacccaaacgccagcatagcaccacacccccaaatgaggggggaacaggctcagcaccccaagacatccaagcaccatggcttttacagctagatgcactctccacaagccaacaggagtcgcgagtgagagccttcgaacacatccagtgtgaacatgcattcagcaaacatttcctgagccctgctttgtgccaggctgttctcagtgctcaggatacacaaggaagaaataaataaaarataaggtttctgtccttgtaaagcttatattcgtgtccgtgtgtgcatgcctgtgtgtatgtataagaatacattcaatagacacaattattaagtaaattaagtcatatgttagaaaataagtgctgtggcaaaatccagattaaaatcaccaatcactagtcaggagaccccatcagctacgsaaagaccatacaggtagtgtgcagagacaccagagaggtcaccctgtttgatcgacaaaagtatgctcattagaaggtaaaccacaggactatggggtctttatctcttttytccctgcaggattctcagctcaagaagagcacctggcacaggtcagggactcagaagcatttgttgaagaaatggaagtgctcacccactgagttcttgcttctgcagcattcctggcaggtmaccctctcgagttggctgaaatctttccaagaatgaaaagctgggcttttacaacaaactaacaagcaaaccccaaccaaccacccccacacacccccaggcgcctttactgtattactttctggaccctctgagacacacacagtctactactaacgccagcacatgctgtgatgggattcccccagcagtgcccacacgatgctgggcccacacagcctgtgacacctgctggccacttcgctcccayggagaagcctctttcacgttcatatgtgctggggatctgtgtctgctgagagctgagctgcctgcctgggatcagccagatggagcaggcagagayggcacggaccacactccagaggaacacgccatggatggctrtaytgttgatgtttcagatatccaaaaagtaaattataaatcttagcggtgatttagctatcctatttgccaaaggtagtttacacgggtgtttcaaattacttggtaagaaggcacaggtgacacgaagggaccacccacaaatatctggcatgttccagtcgcatgcatggcatgtcgcatgtggtgcgacagttctcaggaaacagcatttgtaaaaacatgcttattaaaaaattagagagattttctataagaaacacataataggcgcagtggctcatgactgtaatcccagcacgttgggaggccgagacaggtggatcacgaggtcaggagatcaagaccatcctggctaacacagtgaaaccctgtctctactaaaaatacaaaaaaaattarccaggggtggttgcgggtgcctgcagtcccagctgctcgggaggctgaggcaggagaatggcatgaacccaggaggcggagcttgcagtgagccgagatcatgccactgcactccagcctgggcaacagagtgagactccatctcaaaacaaaacaaaacaaaacaaaacaaaaaacaagaaagaaacacataataatgctaatctaatcatttgtgtatttttaagtttttaacttactgatacatgtcaatgtgttaagaccaaaaaaatacatgaatttaatttaagtctagacggcaaagtcaaattaatgtagtatacaattttcttaataaacttttcctttcctaccctctttcgccccattttgaactttaaagaaaaatttgcctttttgctgcttcctaaacaatctatgactgctacaatagtcaatctttattttcccacttagtttgcttatggatgtgagggttaaatgttatgaacataatttagtgcttacaacatcagcaaatctggcttcttccttgagctgatacacagtgaggttaaggtcagggaaacatccgtgccttctggtccaagctgagagcattgctaaggtaagcaatcaaagctgggaaggctggggttggggaggtgtcaaggatgacacaatacaaatgctaaagtctacaaaacaaggttgaagactcaagtccacagcagcagtggttaaggggcgggggattcttgcttgaagacgacaccaggcacattttccagttggagagcttgtagtgaattcagatcacttggtatttcaagtgtttcccaaactactgtagatgaagggctctgaaattattccattttgaaactcattactgattttgttacaaccaaatagcagcaaacatttgtacagcagtttccagtagttgtacataaaaatgctttggaacacattacttgggaaatggaactttacacagacaaatcagaatgccacttacctaatggagacagtttgcttactaattaattctcaagtccattttgtaaataaaaacagaaatggggccatcctggagaatcatgatgctgttaactgagctacatggaaggcgcagttttcctcctcttatcactggtcttttccttctcacactmagcaatctgagcaccacggggggcaacacctgctctctaatacagaagagatgggtgtatacctccattctaatacagaatgtctccatatacccagccatttctagggaaaatcatctctgacagctggcatgaaatcaatgtccacctgaaaagtacctttgagggccatctaataaaggccaaaactatgsccacgaatccaaaactgcggaagtctagactggcgtttctaaataagctagagaaaaatactcaatgtgcgacatcttgtaaactcacagctgctgaagaacagtgtctttcagtcacatagctgaactgaatgcagaggacactgccatttgtgaccaacatttcctttctagggaggaatacccaggacacttgttacggctgctacctaagtgctaagatagggcgcttcgccactgtgccccctgcttcatctcaaaaactaaaattttccatcaaaaattgccctcattttgtgcctttttgcaaaagtgaagctatctaaattctagcaaaggaacgaacacaggtatttcagaataccccacctttaagggtctcaaagattccagggtgttccctcttaggatggagttttatcttggctgaaataaaagggtcttaataaagtctttttcctgcagacctctgggtataaattatagattcatgtcaaaacagtgaaagggatttgaggcaaaagatatttctttcataaaatattatgcatcagagtatacgttctatgctataaatatttagcaagggataatgtgacatatttactaatatttctgtcaaaataacaacatctaaactgtcacttcaacaaggaagcttctcttcctgttttagtatagagaagcactrggatatcgtctcttttccttttaaagaaaaatgtattctgactgctggtaaaatcaggagtaacttgagtctgtgacttaaagggcagaactaagccctatactacagtgataacagtaacaggaacatctgattacakataagctggctcctcataaaccctgatacaacctaaggcctccattttcattacacaccttcaaagatgcttttaaaatggacttgtttattgacaacacaagattttttttaagtacttgttttccttttctaaaggggagacttcttgctatttgctaattttcacatctgtcaatgctgacaacaactggatctgttgaataaacatttattccttttgacaaagaaccttcacataaaattgaactcaatggaactttatgatcggggcaagagaatttggagcaacttcacagattagtaatatctaacagtggccaggccctggaggttctcttgcagtgaccctggggaatggaccagtctttgtatcagcagaggacagaccagagcttttcaggaggaagaaaaaaaacaacccaacaaatcaatacagcaatatacaatggtagacaaagctacacgcgtttacagagtttcagcgcatagaaacatccagttcagaagcctgttaaacttacatctgtatttggaatctcatgggaggcaacccctggcaaaatatcaactcttattgaaccaaaacaaaatctgtgtaggcacagagtatcagtacaaaatatccaaaaacaaaagctcacttttccaaaagaaaaacgctaagttcaaggaagcagccaataagtaagagaagtttgggcttttgaccttcccaccctcccatgccacctaggaatattcatttttaaaagactgaagttaaaatatataatacatatatgaaaagatcccctaatttgggccagccataatcatcttaaaatggtaacctgggtaacaacyacctaycataatttatcctttgaagataaccacagattcatggttttgattttaaaagcttctttccaaacaaataaataggtatcaaatcaaaaggcacactttaaaaataggaagattttgctaatttgtcttcatttgcaaagatkaatcttactctgaaacctcatttgagagtgctctagtctctcaggatgcatagaaatgccttataaatgctaagtyatataataatggttatgtatttgggtgttagtcatctgctcttcttgctgagataaatagctaccatctgaaggtgaacacttcaccttccctacatttacaatactctaccatcaaactttcatttagattagcaaataaatgggagttgataagagagctgtcaggcatacctaacaaacctgaaacctaagtgttaggaaagttattctgactcaagtattctacatacaatgaatttggggaccttatagggtaatagggaaggaaaaaagatttttctcttaactagctgctgggccccacaaacagggagaattgtctaaacctgagccaccattctgatcctcaaaccctgccaggtgaggacctatagctagattgtgtactggaggatattagagcagattgctcctctgccaacttctctccttccttcttctatttcttccctttcaaaccagaccactgaaactctcagtctgtatttatgtgaaataacaggracgttaaacatgctaccttcyatttgtacagaattgccatgcaacacaaagaatgattatgcattagctacgtcacatttacctgtgaaatttatctcattgtagcactataactctatttactaaaatatgttcatccttcgatcacatagtattttcaccaacttaaaattttaaacggaatcagaaaatatacagcctttcctaatggcctccttaggttttcaagcttctccccaccttctactttttttcagatggtataaggacttttcatctgtgataccaatgggtacttttggttggaaaatcttcctctgacacagtccacaagtcacacattacacacctaagtggtcacaaacaggattttaatctatgtgaacagatcaccaatcttggtttcatccttttatgagtaaaatgtcatawaaaaataaactccttaatacatgtaataagttacaagtgaagtaaaaactaaatattagaggaaaagatacaaataagttagttgttgcttttttaagtttttcaagatacagaatatcattacagctgttgcatttgaaagatgatgcaacagacaagggcaaccacacccccaagatctttgcagctccacaagaataggatttagacccttaaagaatatgtcttaacatttatcagtcaataatgtattaggcatttttaagtaatttctaaccaacaacccatcatcatcactgaatcatctgagcatgaactaagctatgcaaacttctttaaagaaagtctgggacaagcttcaatctaatgaaggcttaggaacagctttactttgtgaacaactacagcttgctggagaagaggcatctcacaatagcacaaaagaacacaaaaaagaaagtgatctttttgattaaccaacgtcactttctgctttgttttaggcattataaggtaaatgaactaaaggtaatcaaatgatgaagttcttcctgccctaaatgaatgtgtgtttagtccatttacctactgagtcaacatggaaagaaaaataagaaagaaaactaaattttgtaagacagtagaagttttaatacatactcagttctaatgccgttaattttgttttccttccgatttccttaagggaagactctggttgagtctttctctgctttccacatagcccctcgaggcacagagacagaagggtctgctgtgggaagagaccatggagcaggtgcagtggcccctctgaggataaaaacaacacgcccagaggctacaaagccagctagtgacccagccttcaccgctcccagactccatctcccctgctcccccgctataccacaggacctttgcaagtgcaaactgcatttgagataagcttccccagacatgctttcatgaggagcttatggcgttttctgtgctcacaagcagggtctggcactgccctaccaagggaatgatcacttgtaagaagagggaggacaaaactatccctgatggctctttcacatgtttcttttaaataaaaagagtgatgatctttctaggcaaggacacaagttgcccaggccaccccctttcccttcaaacacccatacccacctcatatggcacatatagtaccccaaaatgccagataagctgggccacctcacacactgcaatgaccaagcccatctcctccattgtcctcatccttccttcgaaatcacctgtcccggcctctttccaaacccaagtggaacagagccacttgaacagagcttccttcacagaaatcctccggaggcaaaatcctagagcacaaactacatagaaactgaacagttaatgtacatttcctttggctaagtcacagacactaaatgttggcagacagagtacatctgaagcaaatcagggccattttcagggcagagacttgcttttattctctgagctccagcaacccgcctctctgacttcttcctcccatggtgcttttccacccagataactcgcccccaaagctgaggaccctcccaaggccatgaaagggscctgggttcacctccactgtcacagagtttaagaacacatgccctgtatagcctattttgtttgcttgtttctttattaaactataagagcatcatccaatttgaaatgcccctcctccaaagaaaaagctgcgtggcccaatgttaaaggtctacatcagaagtcactgttgcacatcattataattaagaaatggcatatcaccttctttgtaaggtataacattttcaatgttgcaatataagctgaccacctcctctaaggcgaggactcggcgtcaggggcagggargtggtgagcaaagaaagggcaaaaacaagaccttgatcacagaagcaagaatctgacattggattatttttgaaacatactacatacataaggaaaatgatgatgctataaattaaagttgtggttttctacattttaaaaaaaggctagccagccgaccttatcatccctgtcattccaatgggaaaaagcgtcatcagcacaattgtagaagcctaraacaatgtgtccctgtcaactcagtgagggttttcttctttcaaagataaatcaagatgccataacctaggaataatataactacttacacacagagaacaaagttggcaatcacgatctgagttaagtttaaggtatgtttgtctttccattttacaagaaggtaaatgaacaggaaagtgagctggaacaagtaaactgagccataagcctacgtgtgcttttttgtagaagcacagtctaaatacacacacgcaagccactgcaaaatgactttctaagttaaaagtcagagaaatcaatgtttgactgactatggagcatamaaattcttcatttgctttcatcagctgaaaaaaaaatgctagaaataactacggagaaatggtaaagaaaaaaatgtaatgtacacagttttgctgaaaaccatgaagataccagcagaagaaaaaagaaaatgaagacgacaaatgtatttcacacaaagatgaccggggctgtttctgcacagcctccacctggagctgaatcaccggccagaacagggattaggacaggcctcactggcctcccagagctgtcagacctcagcagggcgggcgcatccttgggtagcccaatcaaggctgagcagtatagaccgtttgcaaacttgcgcaaactgtgaagttatttacatgcattcagggaaaagactcccccaaacagggaagcttctaccaaacaaatgccttaaaaattattttatgaaagagatgtctgttatgtgtaaacagacactaattgttgctgcaccttgggtaagtgacagggctcagagaacaggaaggaagcctgtgacttagcagacaacaggacagttcttccctttgaccttccactggtcccagattatgactcagagactgtctcccactctttacccaaggggagatccctgcacctcctcctcyaacatcctacatctttaaaatgctcctctgaatcccagaactacagaaaccacagcactcgtgctggtgagcagattcctaattgcagaagatgcatacaacttgatgctttcagattagagtctacccattcctaccatgcatttgttcctacacaatagcatacgggcatgtgtaggaggtcaccccacattctttattaactta

SEQ ID NO: 9870 - DNA, 54457 bp, Homo sapiens
caggattttacagagcggaagttctttgagggcaagaacctgccacatggcctgagtgtctctccctggtgacattataacaaattaacaagcaaaacaaacattattgagctcctctcctatgataaaagtgcttaaacacttgctaattcgttttttgaaacactgagtaactgtgctgggatgcatcaaattcttgcccatttatgtcccatctggatcataacagatccttctctccctgaattaaagaaaaacttagattatgctggagtccaagaaagtatttgcctattaggctttggcagtggttttcaagcttttaataccragagtcatctggggtattttctagaagagtagatttctcagctgcacggacaaagttcctgatttcgtggaatagggcctgaagtgtgcattttaataagtggtctaggtaatcttaaagtagatagtttgtcaatcctactctgaagaaaaaacggggctgtgggaacttgctttcccagagacaatctgcaatgggtggggcaaaggcaaagaaggggccaccacccccagaaaggtctatccagattttcctcagcctcttctttggttatactccaactctgattaccaaatctttgagaccctcagccaacaggccacttggccttgaagagtcatttttatctgcagggatctcccacccacaggcctccacttggcctgccctcactggaggaaacaaacacaccagtgctctgttaaccagctgcagtgttgggcttacaggttattttaactccactatgaatcagaacagaattatgaacaatttacatgagacttgtcacatcttgtttcagtctttctttggctcatagttttccttgtttggcctttcaaatacttatacgtctgattattttcaagtctggaagactacataggtagcattacacagatmtggcttctcatggctgacatctcaggaagctctcaaattcacaaccccacatgtcaaaagtaaggaaacagagaaagcttccaaaaaggcagggcagagctgggtagagcatctcagctggcacccaggctgagtaattcttctctgtgtcttagcatgccatatacagaggcctgaggccaaatggatttccacaacaacttctgcagcctaattaagacccatcctgtttgcacacgggaactttgtagggtagacaactgttaataagaaagaaataaagtatttttttagaaaaatactcctgccctaaagcagatgttaaacaaccaggctcccaaaagaatcttgtataaatgatcctctaagcatgagttagaatctctacttcaaatgagagaaatattctctggagatttcccctaactgaggcaatgaatgctcccatgagcttcctgggcacaagagataccccagaacactggtatttcttctaagaaggcagagttcaagtgctctgtagagtgataaaacttaccacgttctcttcctccgatgcttgattccacccggggttcacaataagtctgtgcaatgtgtttgttgaaaaactggttctcactttcttccaggtgtgcagggtttctgagccaggagcagttgaggagtgggaagaacatctggaaagactgggagtaaggacgccccatctgatggaagaaaggaaacacatgcccacccatttttgcacctgggtctttcatttgcctttacactggactcttgcaagccctaagcaggacattgcatcaagctaatgggcttgtgttgaggtctctttcaactcaccccaagccttgggagagtcatatttctgacaactaaattcatgaagycttcctaagcctcttttaaatcatgattctccctttgaaacaataggcacacacattaaagtccaaatagtcattaacctttatcaccattcactaggaggtcagaacagaagagcaccatgtaggaatggacagccttgtgggtgtcgtggatgcatggtcccatctggaaccctggggcacagatatcatgagcagaggaggcagcagggccaggggtggatgcgaattctgcctctaccacttctaaccagtacaccctgggcagtgtacttgactgctttgttcttcagtctcctcctctgtgaggttgagataatggtagcaactaatttaggagattattgtgagaattaaatgagattgtctatgtcataataggtatgcaataagtgcctaatatatgttgattttttactctgttttctagagaagacagatgtagaatttagtcttcatgatgggtggcttctgaagatgtcaaaagggacaatgcctcagaggctggcagccccctgacatggtgaaataggcagccgtgtggtcaggccagggcacaagattcacacactccctctctccctcagtaatgctcaggttgtctacaggaaacatcctatagtcctayatawcttgttccccacgttgaacaaagtgaggagaaagacataaaaggatttctctgctcttgctcagttttcatctcatgaaagaataagacttgcctcaaatttcatgagtgtacagtcgagttcttacctggcagaactaatcttctgggggaacaataataggtcatgttaattaagtactcattctcctaagtatattttttattatctcatttttttctcatagcaaccctctaaagagggtctattgtcatccccatcttacagaggaaactgagcacagaatggtaacttgcccaaggtcatcatttagccagaacttaaacccaytgggtcaaactccagcacccactatacaaagctgtctcatctcaaccagccctctctccttctgactcacttcggtatttcattttttaattgacatttgctaagaaggtcaaatggatgaygaaggatgttgttgagcactcattttagcaaagttgtatctagcacttaatcatgtgaccaattgctgtactaagactaggggataaagggaggggaggacatgcagtccatgtccctaatgaacattccatctccttgattggcgggggagagagagaaagagagagagaggccacatgaaagaaaaataacaatgtaagaaagggagagaggaagagagaggaagcagagatctgggagagtacagaggagtgatgcggtgattcaaccccacaaggaaggtcagtgtgtcttctttgcatatacggtaaacagaagaaactgaagcttagagatcttaaatagcaaatcctagtttgcttagcaagtcagtggggggaggtaggagactagtgtctgactctgaagcccacaccctcttcactgcacatatgtctccctgatcctgaaagggtagtttacgaccatgtccttaagggcctgaatgttgcactaaggagcttgggctttattctctaatgaatataagtacccacaatgctcctctgctctaaagttaagagcatcatctagggattgcygggcagaaggcaaaycccactggtttccttctacgcacacatatatcccctccaagggtgtccagtgagccaatcaaccacttttttcacttttatgcaaacacagcagctggattagctgcacctgcagcctctgctgtgtcacacatgataaaaggatcaaagtctagaacatgacttcagactataatttaagataattaagatttttaacctaaattacattttaacatttcataacagagctgtcaagattctatctatcaaaactctatcaagcaaacaaaagaggataattatattttcagacacatgcagtcatcactctgcttaagttctcataaaaaagacttctgtcttctttcacattctcattttcaattgctcttcctcttcccagccacccttggattctgagactatgcattcttaaacaagaggaaaatattccagaggagtttgtaactcaggccatgaaagtgtttctcagaagcggcagttctaattagaactgcatctaaaggaaatatctcttcattggtagggacatcttgcctcactaaatagactctgattggggatgagaaaaggcagcatattaaactcttcaaatcaaagagaacaatgaaatgccaaaaagtttcctcctagaagctgaatttgctttcatcttgtcccattaagatatggagattgttgcaaaatctttgagttgccacaggaagaatactaactattttgggtattgctggatgcctgcccatcatccacttcacctctcccctgaccattaggaatcagccatgtcagtgaggtaaaaatgaccctactccccgctgcagtggcctaaggcactcaatgtaatcttatcctcattaagactgtgattgattcaggaatacacaaggaatacatgctgcagccaacccttgcacggcgtcccccagttcccatgactgctcaagacaggggcacaggatcttacttggccccatggccaagaatgaagcccacaagttttgttggacagtagagaggagagaaatgttcttcctttggaccttcttttggctcttcttttggacctgtgtgtgcagacattggacccagaactgttgcaggcattttgctatcaataagggaagcctgaggacaaagcctacacactaggaggatgaagccaggactgttacagagaaacagagcaggaatcctgattaaactgtgcgtgaacactgacacagccagtttgagttcagttctgctttgtttgcaaccaagagcatcctaactgatccaccaactctaatagttaagtacagtgttcttagctttgtgggatcgtagccctttgaaaatctgatatagaccaggatcccgcttcccagaaaaacacatgtacaaaaggtcacataaaatctaggggtgacaggggcatggactccagattgagtctccagcagactggttaggcacttaggctttgaggtaggatagatctgggttcaaatcctagctcagctaccaccagcttcttgtcactttatgtaactcttctgaacctcattttattatgccataaaatgagaataataatatctacttcacaggggtgtaaaatgtaaacaaaatcatgaatgtctagagattagcacagtacctatctcacagtcacaacccacagcctatggcatcaggcaattaagaatagtccttaaagggccaggcgygatggctcacacctgtaatcccagcactttgggaggccaagccaggcggatcacgaggtcaggagttcaagaccagcctcamcaacatggtaaaaccccatctctactaaaaatacaaaaattagccaggcgtgatggtgggcgcctgtaatcccagctactcaggaggctgagacaggagaatggcttgaacctgggaggcggaggttgcagtgatccgagatcatgccattgcactacagcmtgggccacagagcaagactccgtctcaaaaaaaaaaaaaaaaaaagaatagtccttaagcccttaagatagatgtccatgtcaagtgttagaatatgcacagaactgaagccatcattgatctgaatatgtaaagcagttgatcaggaattggtcctagatttggggaaaacttgtcacgaggacaggaatttgggcaagacatagcttcttaatctgaaaagtgcctagctagttctcaagactataatggagtcagatgagagaaaaaggatttgatccacttggggcagaatagggaaggttttgttaactgtraagttttaaaaggcagagtaaaggagaataaaaaagacttatggttgcacatctgcagactttcacaatcataagaccaaaaactagtaatttcccatcccagcccmggagaaatgactcactgggctgtccttcataggcccaaatcccaaagtttcttataaaaaggtgaaattttggactccatgggcaatggccaccctgcccaatatccctgcctgctgttcaactcatgtcctgcccgcccacctccagcacctgyaagtcctactccacccagaggatgtcytggctgctcatatttcaacgaaatcgtaaggctcttcgagtattcctccttgatttatgacttggaaatgtcagcaggaatggaaaatccaggacatggccaggaagaacacagtccagggacgttttagagctgatacagcccatctgcttggtccttcactgtagttctctatttctaccttctactaccttatttttctttctgcatcaaaacattcctttttttttttccactccatttttctaagtaggycagtcacaagtaagcatctttttgaaggctaatgcaatcccatcactgtgttctctacacttaactcagtatgaggatgccaaagtaagtcccaatgaaacagcacagtgaattgacccctccctaccaccaagtggacagcaagattggactggaagtgtgtcccatcccaacctattatcctggttaaatttgtttcttcctatgaatcttctccttcaaaacactctcagcattctagagggaggagatcacaaataaacaaaaggtaaagaactgttctgacttcccacatcacagccagtgatgactcagcaaccaagttctgctcccttctagaaacaacatagacaaagaaagcaaaaggaaagaaatgctgacagagacccacaaaggccgctgtgatttggtaaagcaccaagcctgccagcacgtcctatggaaagtgagggcagacacaaccacagttggcagggagaacagccaagccgcagcacagctaatgacagtcaccactctggagaaatgcttcaaagggcagctgcagaggtggcagccagctcactgaggaaaacgtaagtcacaggagaggagaggggaggtggggaygctctcagggagtggctgtgttctgttttatttgctgcacatgctaaaccaagacttcaaccagaaagcaaaggttccaggaatcatgggcaagcatttgaagaaataaggctcaaagtcctcaagtgatgttaaaatatttgccttgatagaccccctcatggctttagaatatgataattttagacacaatcaccagagatgttgtaaactgctgagcacctaatatgtatctttttttaaagtaggataatagttctgcaaggctaacattctcactttttacaatagaaagtaggagctgagagaccccatgctgcagctcagagccactaacttttcctccagatagcaaggatctaggaaataattgagccacaaataattactggtatgcktggccctgggaactattccatggccaagagctcaagctggaaaatcccctttcctgaccttacttcctgcacttcttaccccacagccctctcatccctgctgatctgtcctcaccttcactgagtctccattttctagattcttctcttgtctcctcattcatcagagtctttctggcttcttttgccccttacccagcctggaatccattagaaatkatttaaatagggcttttgcaggaatcttagaattgctcactcccaaactgcctcctatggctggattgtcaatcatcgaatctggcaaacccatacttatcttccctctatccatagctgccaagtagtgtgggaaaaatcaccaaagcacatagattgtatcccacaartctattttctctaaatcctggctgggccctccctccttcttgacaatcctttctgttaacttttcctgttgcccttcagcacttctaacagcattagtctcctcagacacataactatctgactgccttacctgcaaagacaactcatctcttgtcattctaagaagaataaatcatttcttggggcttctctcaagtttttcctcaaaattttctgtgtttttcgtcacagttttaccttccctcctattgaaaagaaagacatattcctgttcctttttataaagctgtactatacctgggctcctcatcctttagcttctcactttctctaggtccttgctccattcatttcgtccttgctcacttgggatttgtctctcagtggctgctagttctatcctctttgttgtaaccaatagcaagaaatattgaactttccggaaaccatgtgtaagctatttcttggagggacacttaaaccaactgagaacacagaaatcccacaaggaaaaamacaacctgctgataatgaactctatttaaaaataaagtattacaatacacacacacaaacacacacacacacacacacacacacacacacacacacaagaataaaggaccaagagggaatggaatgccagmagatgtaattaatacatgagagaattatcattccaagtactgggagagaagagaactgaaacagactaaaaaatatgtatatttaaaattattaaaactttgttaaaaaataataaaagtatgaaaaaggacagatttttaaaaaacagaatttataggaatgaaaaatatagtgcttaaaattagaagttcaaggccaggcacggtggctcacacctgtaatttcagcactttgggaggccaaggagggtctatcacttgaggctatgagttcaagaacagcctggccaacatggcaaaaccccatctctattaaaaatacaaaaattagctgggcatagtggtgcatgcctgcaatcccagctacttgggaggctgaggcataagaatcacttgaaccaggaagctgaagttccagtgagccgagatcatgtcactgcactccagcctgggtgacacagtgagaccttgtctcaaaaataataataacaaaaaaataaaattagaagctcaaagtatgtggcagattaaacagagttgaagagaatattacaaaaatgggaactagatctaaagaaattatgcagaatacagctgagaataataaaaagataggaaatatgaaagtagttaagagatataaaggctagggtatgaaagtccaaaataaatctccaaaaagagaaaaaagagagaatgagggtgaggtaatattgaaaagacaatggctaagatttttccagaactgaattgtaattcctcaaaatgaaaaagtacccaaatgctgaagaggctaaatgaaaatgaatctgctactagacacactgtggtaaaattgcagaatagcaaaaacagcagaaaatctccaaagcaaacaaagagaagatacaaattgccaacaaaaaaatgacagctggatccccagtagacttcccatcagcaacagaatatcccacaagaaaatcacattgtattttcatgctattgtttgaaaacaactgtcaacctagaatacaacacctaactcaacaaaactcccagagaggagagtaaagatgtttatggaaaaaggaaaggagaatttgccattcatcactgaaatacctactaaaaatacacttcattaaggaaatttagtccagaacaaagaagtaaaaagcaagatgcaatgatgaacacaaatatcagtacatatgatgataaatggaaactgtaaacaaagcataataataattcagacaactaatgaggaagttagaactagatagaagacaatagtagtcactaataacatggaaatggaagaggagctgagtttaaaaagtaagctcagatgaatggataaagaaaatgtgaaataatccacaaaattacatatatatataaattacatatataatgatatatctaaattattccacataaatttcatatataggtatatatagcatcattatatacatgtatgtatacataatatctcattttagatatatatacacacacacactcacatatgaatataaaaaaagcaggaaattttgccatttgtaacaatatggatgaaccctaaggacattattctaagtgaaataagccagacacagaaagaaaaatactcactcatgacctcacatatgacctcacttatatgtggaatctttaaaaagttgaactcatagaagcacacagtagatgatgattttcaggggctggatgggcagggaatgggaagatggtaaaataaagggtacgaactttcgattataggatggataagttctgggaatctaatgcatagcacggtgattatagttaataatactgtatggtatacttaaaatttgctaagagaaaagaactttagtgttctcagcacacaaaaaagtaactctgtgaggtgacaaattgtgttaattcacttgaatctggtgatggtttcacaatgggtatgtatgtcgaatcattgcattggacaccttaaacatatacaatttttgtttgtcaggtgtaactcaataaagctgaacagacaagtggaagtcctcacagtgcttgggaaacattaactttaaacttagtcaagtattagtcacaagaatttaaagattatcactataatttaaatttagaatttaaagattatcacaatagaaataaaaagtataactcccaaactagaaaaagaagaagaggaaaaacaaaactcaaatagaccaaaagggcaaaaagaaaggagaatgacgcaaaaacagaaaattagatggaagaaatagatccaaatatactagtaatatatgtaaaaaaattaaaaccactggttatagtctcagactggaatttttgaaatttgaactgtatgatatttacaaggtacagatgaaaaaagatacgccaggcaaatagtaagtgcaagaaagctaggagagccttattataatcagacaaaatggaatttaagacagagttgttagtattaaacacactaaatgagaagggaaatttttttcaggaagagagactgaccttgactgttgtgctaaacaatatggtctcaaaatatataaagcaaaaagctgcaagattataaggggaaaaaatgaaaaaatcacagaggtagattttaacacatctttgtcagaaagcgagtcacctagaccaaaaattggtaagacatagaagattcaaataattataataatcaatattgacctatgtgacatttagaattctgagatgaggcagaaaaacataactttcaaataatggaacacccatgccaaatgaaaggtgttttttccgcctgacatcaacagattctgacaccaaatgtgtaggggattttccacacccacaaccaattctacaattccttggcaccaaccgggtattctacaattcagttcaattctgacactaactaaccasagttagtatcagacaccaaaggtttaaggactcagtaccacgaatcagtcacaagtatgaggttcccagattactgatgcctcatctgacttagctacaaggttgtggaatcccataatcccctccttcaggttgtgaacagctcacagaattcaggaaagcaccttacttgcacttactggtttattataaagggtacaaatgagccaaatgaacaggtatgtagagtgaagtccagatgtgtcccaagctcaggagcctctgtcctgtggagttgggatgtggcaccctcccagtatatggatgcattcaccaacccagaagctctccaaaccccattgtttaggatttttttaaggaagttaaatcacaaaggagtgatcaattattaactcaatctccagccccttcttcctacctggaggttgaggggtgcggctgaaagttttaggcttctaatcaagttttctggttggtgaccagtccccatcctgaagtgatctaagggcccaaccaagagtcacttcattagaacaaaatatgctcctatcagcctggcgtggtggctcacgcctgtaatcccagcactttgggaggccgaggcaggcagatcacctgaggtcgggagttcaagaccagcctgaccaacatggagaaatcccgtccctactaaaaatacaaaattagccaggtgtggtggcacatgcctgtaatcccagctactcaggaggctgaggcaggagaattgcttgaacctggaaggtggaggttgcagtgagccaagatcacgtcattgcactccaacctgggcaacaacagtgaaactccatctcaaaaaaaaaaaaaaaatatatawatatatatatatatatatatatatatatatgctcctatcaccccatcactcagagaattataagagattcaggagctctgtcaaaaaccaaggacaaagatcaaacatatttccatgatgccacacaaagaaaacatatttccaaataacttgtgagctaacaactcatgatagaaattattagcatgacatgtcaaaacttgtatgatacacctaaagtagtattaaaagtaaaaagtacatatatgtatatatgtatcacaatgaactagaaataaggtgaactaagcattcaattcaagaagttagaaagagaaagatggaacttgaagaaagtagatggatgcatataataaacgtaagggcactttggaaggccgaggcaggtagctcgcttgagctcgggagttcgagaccagcctgggcaacatggtgaaaccctatytctatcaaaaatataaaaaattagttgagcatggtggcatgcacctatggtcccagctactcaggaggctaagrtgggaggaycaagcactcgagcccagaaggtggaggttgattgcagtaagccgagatggtaccactactctccagtctgggtgacaaagtgagaccctgtctcaaaataataataataataataataataataaacacaagggaagaaacgatagaaaagaacaataaaaccaagttctttttctgaaatggaaaattaaatagatgattttctggtaagatgggtcaaggaaaggagattgtacaagttagacaatggtagcagtagaaaagagaagagcattttagatgaactagggattcaaaactaatcttaagtgaacactatgaacccacattttgagaaataaatttataattttttgataaatttgccaatattgactcaaaaagaaataaaaacaagtctataattttaaagactatccccaaattttatccacataaattcctaaagccagatgatttctactaatgagtattaccaaagcttcaataaacataaaatcttaattttatataagctatattgaaaagtaaaatagaaatctctcaatcttcctttaggtaccattataaccttggcaccaaaactaaacaaggggagtctgagaaataatagtaataggaagaagaaaatggagttgacatacattaaatgttcaacaaggcactgagaactgttttagagttttacttggattattcttttcttttcttttttttttttttgagactaagtctcactttatcactcaggctggagtgcagtggcacaatctccgctcactgaaacctctgcctcctggcttcaagtgattctcctgcctcagcctcctgagtaactgggattacaggtgtgcaccatcacgcctggctaatttttgtatttttagtagagacagggtttcaccatgttgcccaggctggtcttgaacttctgacctcaagtgatccacctgccttggcctcccaaagtgctgggattacaggtatgagccaccgtgcccagccttatttggattatatcatttaatttcttcaaaaaaaaaaaaaaactatgtggttggtgttattattaactgcatttggagataaggaaactgagtcataaagaatgtctgtaatttactcaagttagtagtcagaagtgatagaacaagaattcaaactttgaacagtctcacttcagagcatgcgctattaaccactatgctataacaccaatatttgcatctgtgaccaaagaatgaatatcaagcgaaaacagatgccaaaaacactaaataaaatgttagcacatctaatcaagcatatttttaaaaagcatttaatcaaatttgaaacctatccatgattttaagatatgaaaaacttagaaaattagaatacaagggaactttcttaatttgataacaggcatctattgaaagcagayatattatagtgagatttcaatttcccattaaattcaggaaaagaaatggatacttctatcatcatttctattcaacattgtactggasattatatcaaataaaataagccaataaagaaaactaaatgcataaagactagaaagaaaaaacaaacctctgatttttcagaccaaattattatatacacagaaaatccaagaaaatgtaccatattattagaatagaaaaacatgggctgggcacagtggctcacacctgtaatcccagcactttgggaggccgaggygagctgatcacctgaggtcaggagttcgagactagcctggccaacatggtgaaacctagtatctactaaaaatacaaaattagcctggcgtagcagtgcatgcttgtagtcccagctacttgggaggctgaggcaggagagttgctcgaacccaggaggcagaggttgcagtgagccaagattgcaccattgcactccagcctgggtgacaagggtgaaactctgtctcaaaaagaaaraaaaaaaaatagaaaaacatgcttcagaaaggttcctagataaaaaaatcaatacacaaacatttgttgaactcttattccattcacactagcaacaaaacatatttattcagtaaaaatttactggatatctactatatagcaggcactgagttatgcactaaaataatatgtccaggacattcatgggaaaaattattaaacattatggaaagatatgaaataagaccaaattaatggagagagatatcatgtatgggaagactcaagactctataaaggacaactccaactctccaaattaatctataaattcagtaaatgcaatccaacccaaaataattttgattaaaatttgatagtatgattctaaaattaacatgaaaaagcaaaggaacaaggatatctgaaataattttaaagaagaacaaggtgcagccttttgccctataatatatcaacatttgctgtaaagttataccaattaagagagtgagttcttggcactaaggttcaccttgaggtgggagtggggtgccacacctgggacacagttttatgggtcctgcattgcccaagggtactggcaacacatctgtgtcaactaggttttgccaaatcataatactgaattctctgctacctttcatggaagagcccctatataaaacagaaaatatgtacagttatgtgtctggacaatttaaatagcttcttggcaatggtctgtaaaactgaatattaaatagaagagtctttccaaatcctatgcagaaaaggcagccttatcaggaaacraaatagaagttgagatttgcccaggcatggtaggaagagacacttcagaaatgaagccagtcatggtgaccttaaatgacctttgttaacaggaggtggtacgcttcagataactcgatgagccatttgccacaagacaattcagggctagaaggcagtggcattaattaaactccttggaaggcagaatcagccttttcattttctctacctccacccccttctctccaaatatttggaagtgatcccattggaataatcctttccctggggctgagaaggaacagtcagcaagccagattagggtaagaactcagtttatttcgggcatgaatattaaatgggatttatgacagatggagtacttgttaattctttctattagtagagctattcataacagtaaagaaagggccatcccagaacagaaagggatgtctttaatcctttctcttggaaaaggccaattctcaatatttctcattccctctctctcccctgacacatgtacagtttctctatcacgtacagactcacactcacacacacacacactctacactccttatcaaaggaaaccagactgccctcagcttgtggacccacggctctcactgattccagcaggaattatgggcatggcattgtgagccagaatgtgacctrtctcctatgaatgagtcctacaccataggaagggaatttgaagttaacagaaagagtcctgtgcttcagccatctgctcagggattccagtttttttatacgacaagaagagcaccagagccctcacagggctagctctttattagcagggaccctccttctagtccagggcccatcttttgtgctgccacataagaaacaatgccctctttccctgatgtcttttaatgtatggttgttcttttattaggcttttgaggtctgagaacccagcagcctcccccaaaccaccccaaaaagacagttcagtatacagaaacagatcagctccatcacagagcttaggaccaaataacgtcggatgctgaaccacatagcaggcagcctccttgctgcttaacagttctcacctcagatatgcgagagctaatataatcatacaagagccagccagggagaacaatgtcgggggaatgcatgaaaaacattcaccgaggttgtactgacacaatccatcctatatcctgacttgagctgcttctctattaagcamggctgatatcactccatcaagtccaacataccggctttggtttgctcaggtataggggtttcaggggtagttgagcaatgttggcattggatcagtcattcacttctcattcatgcattcaacattttactgaatactataaaccaagtacattggtaggctccagcacaatccaggagagaaaagaaacaaacaatagcaacactgtgtaatagtaacacagtatactggatttgcatttgtggtgataggataagatgcagagaaaacttcccaggagacttgactgctaggctgagtcttaaagaacaagtgttgagggtatattggtgatgcctcccctgcttccttgatgggcttcctttcatcaaaaacactccaaaaacatccctggtatcactatgaaggtgagaattcaaccgatgtttgaagcawttcacttcaccaaaatgaaacaattctaataaaaggtgctccatatctctgaaattaataaaccatctcaaacatgtttaattgcccaaaacattttttagtcacaaaggcaggaatccagctattagagaaaacaaatcatatttcggtattttattttctataaatagtttttgttctgttttgttttgtataaaacagggatcacgtgttatacacataattttgtaacctgtttttttttttttcacttaacattctattttaagcaattcccacattcttaaatactctctgagaagggtatttttaatggctgaaaaacattctaccatatggatgggccacaattatttcagatatttcctcacwgttggaaatgtaggtcatggccattcctttgctctacatgctgcaatgaacatctgagtacacaggtctgtttgtgcatatacaattacttcctagcaataaatttctaaaagcacartaactggaacaaacaccacatatattttctggattcttgctatatattactgaatttccccagaaatacaaacacagttcgtactacccagtgggtacttaataaatatttatcaatcaatcaatgaataaatgatttttaagattctttgtgatactcttgtgaaaagttgccatatttgaactataagaaactaagtaaactttgagggagtaataaacacttggattggaggaaccagtaaactaataaatgtttaaatatctcagaagaatacagaccaaaaattacatctacagtagagttatatattcattggatggaaaattgtatacccaaaataatgctgcagaagagtaattattgtcatagcaaaatgtgcaccttgtgacactaaacaaaataaacatccatataagtatrtaagtgtaagctatatttactgctttggactatagtatgatcttatttttgtggaatacgtatgtgtgtaatacatactgtattatatacactagaagacaaacacaaatattaacagtgattctgttgrgttataggtgatgttttcattgtgatgtgtgtgtgtgtgtgtgtgtgtgtgtgtgtgtgtgtgtgtgcatcccaaatcttgtatatcaagcatggcactactttttttaattcaaaaaacctgttgttaaatgttgaattaccatagaactaaagggaatactttccagagctagaaatctaacataaagatagtaaacaaaatgataaacaagcagttcttcccctgagggtttataattctgctggggctgccataacaaaataccatagactgggtggcttaagcaacagaaattcattttctcatagtgctggaggctagaagtctgagatcaggtgccaacatggttgggtgtttgtgggagctcccttcctggcttcttacagacagccaccttctcattgtgtcctcacatggccttttctcagtgtgtgtgcagagaaagagagggagagagtgttctggtgtctcttcttgtaagagtactaatcccatcatgaagaccctatcctcatgacctcatctacccctaattacctccataaggcctcatctccaagtaccatcacattgagggttagggattcaacatatgaattgtggggacacaaacattcagtctataacagaggggatcaatattaagargggctcaaattcacatattttaaaataaaatatttatgcaagtcgccttgatagatgatatagtacagagaatacaaccatgaacaggatgcagtcctggccatcaaataaacacattcttatgagaggagacagaaaattgttacaaatcagtgcaatagaattctaacaaaagtatatgctgggatatagcttcagtggagagagggaacacagaagaagagatcttagtctggaaacaatcatgaaatgtttctaaaataagtgaaacttaagctgaattttgggaaaaaaaaagaggaattattgaagcttgcagaaggctgtgccaggcagaggctacagcctgtaccaaggcaatgaggtgctgaggtgctataatagaaaacaactcaacacacataaaaggatgaggcagaggacaaggttggaggaaggactcccatctctaacctggttcctgaattactgggggatctcatcagagattcaataagctgaactggacgaaattggtatgccacgttaggaggtttgaactttatctccaggaccacacaactcactaaaatttaaacagggaagaacaaaaaatgactcatgattcaggaatacccctctggtaacaaagtggaaaggaataaattcactatcaatttcaagaataaaggcagaaagctagtgcagaggttctcctaataattcagatgaaaagtgatgagatcctaagtgataaggcccagatatttatttagaaaatcaataagatgtgtattgccaaagagacaaattggttatagaaaatgtctatagtgaagctataaactgcatatggttgactaagagggtgaacgatgtgaaaggcctgaattaagaaaaaactgcaaagccattagaaacaaggctacttaatcaacatggcaaccaaccagtaggattattcaaagcatgtatattgagttatgcttgtagaaattgactacagttgtaataattaatgttctaagacacactgttgcatatcaaacaatctgaatcaggaattttcaggtcatgctcaaggctactgcatgaagacaggaggtggcataaagagggccaacagtaagaatcctgcctctccctcacttaggctagagtctctgccactttaggagagaaaacatgcttgaaagccactgatctaaataaatgtgtatgtgtgtatatgccaatggggatgtataaccaaacttttcrtatgacctaaacctaactaaatatataccaccttggcatattaatcagcaatgtatatttttgtcccatgtggaaacttaataagcacaccacaactaacgggttttaggttcttccactaaataataagttccttaaagacagagattccctccctcccactgtttattatagactttacaaatgaggtgtccgataaacatttgcttgctaaaaagaaaaggcaggataatttttaaaaataaacaacgaagaaatkcttttgtggacccaaaagcaatttgtctgaaggggaaacacatctcaggttaaatttgtaatctgcacacatacagaaagaatgctaattattatccttaatgatttagctataaggaatgaagtcagtataccataaccccagtttacaacacaaccatcttaggacatggtaaagaatagcacatcatagtggtggctttatgttaaggaatataccagctcattacgttccaaacaattatagtgaaagactggtctcttcccaaagctgtattttctctttatgtacacacacacacacacacacacagccaaagaggcatgttaagcaaaccttattgtctctgcaatgactacttaagcaagaaggcaaccaatcagtaggattattcaaagcatgtatattgaattatctttgtgtaagttatatctatatatctatgcatatcatatatgatgttaaatacaaatgagatgagatgcctatcttttgcagtctgtaagaattttttttaaaggaagcatcccagttgtgttgactgcctcagattcatttccctattttaagttttagagcctaagagaaaacagcatttgcagtgatttttgtgggttcaatgaaaaggtcacatgaagcatgcacttgttttaagagcttgaaaattctataggaaagacagaaaaaactcatacaataaataaaaaggtgagctgaggccgggcgcagtggctcatgcctgtaatcccagcactttgggaggccgagacgggcagatcacctgagatcaggagttcaagaccagcctggccaacatggtgaaaccccgtctctattaaaaatacaaaattagccaggcatggtggcagatgcctgtaatcccagatacccaggaggctgaggcaggagaatcayttgaacccaggaggcagaggttgccatgagctgagatcatgccactgcactccagcctgggcaacaaagcaagactctgcttcaaaaaaaaaaaaaaagaaagaaagaaaaaaaaaaaggtgggctgctgttagctgtttatttcgggcacctgattgatgtcgtgagggaaaatgttatacaccaaacagtaacttggtgattatttctcctagcataattaaatttataactaaattctgtacattattatttagatcaatggaacagaacagagccctcagaaataatgccacatatctacaactatctgatctttgasaaacctgagaaaaacaagaaatggggaaaggattccctatttaataaatggtgctgggaaaactggctagccatatgtagaaagctgaaactggatccctttcttacaccttatacaaaaattaattcaagatggattaaagacttaaacgttagacctaaaaccataaaaaccctagaagaaaacctaggtattaccattcaggacatagrcatgggcaaggacttcatgtctaaaacaccaaaagcaatggcaacaaaagscaaaattgacaaatgggatctaattaaactaaagagcttctgcacagcaaaagaaactaccatcagagtgaacaggcaacctacaaaatgggagaaaattttcgcaacctactcatctgacaaagggctaatatccagaatctacaatgaactcaaacaaatttacaagaaaaaaaccaacaaccccatcaaaaagtgggcaaaggatatgaacagacacttctcaaaagaagacatttatgcagccaaaaaacacatgaaaaaatgctcaccatcactggccatcagagaaatgcaaatcaaaaccacaatgagatatcatctcacaccagttagaatggcaatcattaaaaagtcaggaaacaacaggtgctggagaggatgtggagaaataggaacacttttacactgttggtgggactgtaaactagttcaaccactgtgcaagtcagtgtggcgattcctcagggatctagaactagaaataccatttgatccagccatcccattactgggtatacacccaaaggattataaatcatgctgctataaagacayatgcacatgtatgtttattgcggcactattcacagtagcaaagacttggaaccaacccaatgtccaacaatgatagactggattaagaaaatgtggcacatatacaccatggaatactatgcagccataaaaaatgatgagttcatgtcctttgaagggacatggatgaaattggaaatcatcattctcagtaaactatcgcaaggacaaaaaaccaaacaccgcatgttctcactcataggtgggagttgaacaatgagaacacatggacacaggaagggaaacatcacactctggggactgttgtggggtgggggtggggggagggatagcattaggagatatacctaatgcyaaatgaygagttaatgggtgcagcacaccakcatggcacatgtatacatatgtaactaacctgcacattgtgcacacgtaccctaaaacttaaagtataataataaaaaaaagaataaagtttagaaaaatttatgaaaaaaataaaaataaaaaaataaagtctttcaaaagcaagtaaaggaaaaacttggcttggctgcctgtagataattttgttttgataccagtttgaataaaacaagaactctctgatggatttataacatgatagtgcaattcaagcatgggataaactgaaggtgacaggaagggtggcacataggccatgtgcaataagcgtcacattgacagggcagcctacaggagaacttagcaaacgtggaaagtgactgggcagaaaggtggtgatacctcagttcagcaatgccctgagtatatgtgaagaagaatctcttgataagcagtataaatccaattagtaacattcagattttcatattttcataaatttcaaacactattttttgaaaagtgcagtcacagtaaatctgagaccgcaatgtattcagcgtaggatagcacagcaagagcagcagtgtgcacagtgccagtccagcatgacaggtccatgaaaatgtctatcccgggagcaacaccactggcccactctacagcttctcctgcatcactgacattgctaagttactttatacacttcattctcatcacagtgagttttctgactcaacattcataagtctctccatgttcttgttcctgcacaagcaaattatttctcaaaacctctttcccaacttctctcttgagggtaggtttctgttctacaatcaagtatcatcttcctcctaatcatgggaaatgctgaggagatattcacctttcctcagtgtggatagtgtgagaaaaagatcaaatccaggaaaaatgagtaccaagaaggaagggggggaatccacctttatccatgtagataacttcagatgcaatcccagaaaggggcagtcatgttcccatgggtgtttaaacatggctggaatatagctaaataaaagcaagctaattatcattgatgagcacacatgctatttacctttggtgagcctttttctgaacttgaacaacggatttccaatatttaccattgcaatgattcataaaaagttaagatattctggatcaaaattgcagtgtccactaaaaatactcagttctgacttccttttcaaatcaatgtgaaaggccatacaaggtaagtatacaattccacactcagtttgagattccagagtgttacttgtgaaaatagatagatgagattgtgagggggggttgcagattctagtaataaatgcatctcttcttcgtataagatcttctcggggatgtgtcactatcctacactgcattgcttctgtttccaattagtttccaaagctaccatagccacagtacacagagtgatacagacaggaagctaagacaattgtatacctctcttgcatggttgataatttaagcagtagaatgtccaagactgtacccatttggggctttattcatcatgaacaacaaggtttttttcctggccttatagtaaatctttcatcaacaactacagtgaacaacacagatccaagaatagagttattctgtgtgacagcagagagaagagtcagatgcatgatccaaggaaaattcccagaaggcatgaagccaaaccaaagtaggagggagcatgtggtggagtgggcttgagtgagcagctgtttcccactattttcctctcagtcaaaactctttttattgccactgcccttaagccacatcaatagccttgccatgattctcttacctcgatgtatttctgttcttgaaatgagatggaaaggcagaaacctgaagagtctctttctcttctccataaatcaccaactagattaaaaaatagagcccattcaccagttactcttctcatctcgtaggactctattaacatggttttgtcaagtgtgctataagggaaatggcttagggaagttggcagacctcaataaaccatcgcatggttgtattgaagttgaacagttagaatggccaggtggcatattaccaaaaagaatgccaagggaaaactamaaaacctctttgtgaaggtcttattcctaaatacacaaacattgaaccccaaaaaatgaacaaatcttcaagattgcagattgatttaataaatttattccagaatcccatatataataaatgattaaaagaaaggaacaaagtttctactaggatgtcttgaacacaaatagctctttcattgtgtataagcctagtgaaatttcattccgatggaacagcctgttctgccgttcaccttcataaagcttcatctaaggataacggccattcaaacaatcaaattacccactgtggtttcttaagaaaggtgcagttctgtatttctaaaatgttcatttatgtaattaatgactttggacttgcagggaaatattctcctgattatttgatacaattgtagggcatgaatctactggcaatgatcaaatcttaaacacaaatgtggaataattgctcaaaatacatgtaaaagtctttcatgattaaattagcatgggactgagaaccaaaagtactgtataagaatcactgcatttacctgaaatttttctgagaaaatcaacatatctatcttagaaatcatagaatctctgagggggctgagaccttagataacwttaaaagcaaacttctttggtagggtgaccaattcttccaggtttgcctgggatttttctgattttagcactgaagattctaagtcttagaaaaatctctgagtcttgggtaaacgaagttggtcactctactctttggattcatgaatcttctctgtgacataacatagaagaaacttaactgagacttcacagagttcggttagaacacagaataacacagacatggacttcacagagttctattctccgttgtgtcaaaatcagtgctatgatctatccttgctctgccttccacagcaagacaaagtttattccctcttctacctggtagctctatgagtatgtgaaggctgcccttcccatcccacatttccccaatccagtctctattctctaggataagctggcctagccccttcatctgctccttgagtgttctcattccattggtaacctcactactctcctctgggcaggctcatctgtcaaggtccctcaagcactgacaggccaaacttagctcaaggctctgcacaatgcctgagcagacttcatgagcccctccttcatgggcctgggtgtcatgttcccatgcagacaracattcctttaattcatttgtccaccatatcccaccatcagataagaatacaattcatgtcaacataaaatcatgaagattttttacatatgctattattcaaagctctgccatcttgtagttttgtaattgaattggtctttagacccaaacatcacacatttatcctttacagtgaacccattattccagcccatgatcccagctttggatcataattctatcacccaaattattcattccagtaatttggttccaggttcatatagtatgcaaatgttttctgcatgtcaacatctgcaatcatgcaaatcattggcagaaatgttgactaggtcaagyggaataccagatgattagtcagtacacacctattggctacataaaggcaggtattcatgtgggtcctttattttgaaatattctttagggctttcccttccagattttagaaattgaaacaagaaagagtacaaacacacagtagccacactttcttcttttcaaccagtaactgccttctctttaccttgagcccacatatattccttcaggcatttccaaacttcaatgaaacaagttatgatagaaatcccatcatgagctggaactgagcagcactgagtgtgaatcatgagtgcagagctgccagtattcttgactctcttctttcctggcacacaatagggctgcatttgcccaccacttttgaggttgggcatggccgtgtgacttgtgttagccaatgacatgcatgtggaatgatatgtattacacactggcaggagctataaaatccagctatggggtttgtcatgtttcctcctcagtgttgttttgatcagggaaagaagtgtcaagacaaagccttcattagcctgggtccctgggagaacrcaactcttagtagggtgaatatgagggtgatggatgtgtcagagttcccctgcggacccatattggacatgcaggttgagtaggaaacraagcccctgagatgtcggttgtttttttttttcactgttctatgactttgcctattacacagggtaactacaatgcagaagtagaaaaatacatgaactcctgtttacaagaagcttacagtatagttgggataaatcatacccacaaaatacaagtaaggactcaattagcatgaagtaggatgctaaactgaaaagtagagataattagccagtaagatgtggtgctaaatgtgagtcactgagatgatgcattaaaagggaattagtaaaataggagctcaatgtgggcttacaattctcagaacacatttcatttccgctaagcaaaagtgcaaattatataatttattgaaaagtattataggaaatggttctacaaatatgttgactcttctctttaaaaactgtaataaaagtgtgggcttaagttatggggccattttccatgtatttgatttyagtcttttctaataaggtacttagtgtttttttaatggacatattatagatctttgtctataatggacagatttagcactttatcaagacagaggggtcaccctttccaggagttttatagaaaccttggcaattattgcaacgcagacaaaatggggctgatcatagcacccacttaaatatgattgactttatttcacagaaaggtccgttattacaacgacacagataaatattcgtctgaatacccaatatcaatttggctgacctagcaaagatatggccttgtttctttttcaaatatattcagcctctcctttctgtccttctatagggatgaaggaagtttggtattaattggaatagtcattcactcatttagcaagcacctactctctgccaaggactgtgctattatgaatagatattggttattcattaatgagcacaatagtctagggtctgtcctcagggagcttacaatgcagagggggaagagacagacagcagagaggggagggagaaggactttctagtagaagaaacaccatgtcttccctactctgaatcagaaagtttcgagtattcaagaaaatcaaagtccagcatgtatcaatcaagcagggtagatgaaaaggaaagttgcttgagatgagactgaagttgggtaatgggcaggccacatgggacttggaccctctcttaattttttttttttttcattttatctcaaatgccctcagagctttaaacagggggtacaatgtgacacaatttccattttaagaaagtcactstggctgtatgaagaatgaactggtagggttagtgtagagatggtggagtaagaagaactgttgtagaagcccaagcaagaggtagcagtgacctagactggagtggtagggatagtaatggcatgaagtaaatagactgaaatatattcggaagtaaaatcttagaggrgtgaatatggatgcgagagctcctggtttctggcatgagcaagtctccattttgcacaataggaagagaggacgaagagctagaatgaggaagcagagtaacggttccctgttgttgaatgcagctgttattgaatgcaattggatacattggtctgaagctcagcagagcagagtgggcaagagatgcaaatgtgggggtcatccgcttaatgctggtattaggctgtgagtacaggacaaggaggacatgtgggcttggaaatgtgagcaagaacaatgaaagttcttgggagccaagaagaagttggatcagaggcctaataagtttaagagaataattcttgacatcccttgatctaatcgcagatctatatgasaatatggaaatgtttgtacctgctcccattatgcccctaaatcacagatcaaaacagtagcatctctgtgcctatctctacatcacaagttaacttcattttcaacttttactacaagtttcctctcccactcaactatttttcaaaagagaatgacatttttatcacggcacaagttttactatctaagcaatcttgggtagaggaatgcttcccaaataccaaactgtgacaaaatgttgttcaccaatccatgacaaaataacaaaactagaaccacagaacatatataatgtcaagataaggtggccaataatcacttcctgggatagatgctccattattctgaaatcatgtcagttctacccttttagtattaaaatatcctttcttttaagaaataatggtgatagattttttttttttttttgagatagagtcttgctctgtcgcccaggctagagttcagtggtgcagtctcagctcactgaaacctctgcctcgtgggttcaagtgattctcctgccacagcctcccaagcagctggcattacaggcatgcaccaccacacctggctaattttggtatgtttagtagagacggggtttcaccaagttggccaggctggtctcaaactcctgacctcagatgatccaccagcctcggcctcccaaagtgctgggattacaggcgtgagccatcacacccagccaagacttttttttctgatgtccttacttagcaaaataaaagattaataattctatgtaaaactctactttttaattgtacaagtctgtgaaatcccaaatcagggaagaataagaaaagagaagaagagaagaacaaagcgtcattgaggagccaagtgccagctctcagctaggtttactctctagctgaaccactccctcccagacacagcctcaggagtccctaggattcacttttgtgcttcagcagacactactaaatgccatgtacatttgaagttgtttccagacagtcaaaaccacaaatgtcagggtgcactttattagtaaaactgactcactgtgcactaggcaaagaaattcctgcattccactctaagaactgtaaacgrggccccagctagctgttctctcttgtgctacttaccatgcttagatcttgatttgaacaaatcgactataaaaagactgtgctggcaattgaatacwtgcgactatggtctgggtattacttactattaaggaattactgttaatttttttaggtgtattaatgacattatrttacgaaaatataattttcttttttcttttttttttggagacagggtcttgatcaggctggagtgsagtgacataatcacagctcactgcatcctcagactcctgggctcaagcaatcctcccatctcagtcttccaagtaattaggactagaagtgtgtattagtctgttctcaagctgctgatgaagacataccctagactgggcaatttgcaaaagaaagaggtttaatggactcacagttccacgtgactgcggatgcctcaccatggcagcagacgagaggagaatgagagccaagtgaaaggggtttccccttataaaaccaccagatctcaggagtcttattcactaccacgacaacagtatgggggaaactgccacccccatgattcaattatctcccaccgggtccctcccacaatatgagggaattatgggagctacaatttatgagatttatgagatttgggtggggacacagccaaaccatatcagtgtgccaccacactcagctaatttttttattatttttagaaacatggtctcactatgttgcccaggctggtctgcactccagggttccagtgatcctcccatcttggcctcccaaagcactaggattacaggcatgagccatcacacccagccaagaaaacattatcttctagatatgcacactgaagtatttgatataaaatgtatgatatttgggattgcttcawaatattttagcaaaaataaaataartgaaatacagcaagctgctgagcattgataagtcttgatgatgatgatggtatatttcactatcttacttttatgtctgtttggaatttttcacagtgagaaggaaggaaggaagggagggagggagggatggagggagggagggaggggaggggagggaggggaggggaggggaggacggactctgtccaacacccttatcatttcataatgactttaaatggaaggaagatagattaataggagggagcaattcccactagtatttgtgaatacctattttgggtgctctccatgacaggaatgcacatgaaggcacatagtacagtctgataggggttacaaccaatgctgtggagatgaggaaaaggaaactcaggttagcctacattaccttttttgtttgtttgttttgagacagagtctcactctgtcacccaggctggagtgtagtggcgcgatcttggctcactgcaacctccacctccggggttcaagccattctcctgtctcagcctcctgtgtatctgggactacaggcacatgccaccacgcccagctaatttttgtatttttagtagagatgaggtttcaccatattggtcaggctagtcttgcactcctgacctcaggtgatccacctgccatggtctcccaaagtgctgggattaccggtgtgagcaactgtgcccagcctaacctacatttccacatggaaaatagaaagagaacaaactggctaaatggagctacttggctgctaaagaaattcatttcagaggaattaaaaacaaaaacaattatgttgattcttaaggggctatctcaaaatccagggacaacacagaccctgcagacacatgggctctgccaggattggggcagccacttcctccaggcccttttgttaattggacctggcaatagctgtcactcccagccatcctgactccggtcctttccatttccctgccactcagataaaggaacawgaattctgacgcggggcatatgaaaaggaaagacagctcttccatagtcacacccagaagagggcagatgaacctgagaaataaaaataaaatcctaagctctgcagctgactgaacaggccccctcttggccaaggggaccacagagaaaccttgaaaactgagttccgagccatgattggatgggagtttggacaggcctagttatacctcctcccttgcttttctttcctaagggttaaacagaaactagtccttgggaaaggcttgccccaccattgatttcaaccaaccccatgactgcccctcccatttagtgcctttgacacaaatgaccagcattccttctgaccacagagtggttctggccagtctacagaggatgtacactgaggatttttgtgtccaatgcttcacctttgatgccagagggctgaaaattctaccctcagatcatgctaacacagtcatttgttgaacatacgacccatggagaggcatgaagttcaattgtgcatgtgtatgtttttcctttcatatttataactcctcctacagcttattaaatatgtatttcagccaccccactcagcataaatttctgytccctttkcccctcccttgaagtatctgtttctggcttctggccaaaggctgtgttttccagcctgtcagaatagccacctgcaggctgcaaccctttatgagaaataaagctctcctttccaaatgtataaacctcatcattctgcagctgacaatcccatctgattgatatgtggctgagagcctcttttcccctgcatttcgtgggaggtggagcatgctaactgaatgccctgcagagaragccgcagattcccccagcttttccccgcatgccttctatccagcacatcctctcctaaatatcactttcttcagagtttatccctgctccaaaacagtcaatgggttctggaggtctatgcttcagcacagtatggtgggtcaaagggcaggctcacagccatactacaaagggtcaaatcctggccacttaggagctgggtaacctgggactagttcttaacctcttaacctctctctacctcagcttccttctcctcttcaaaaacaagatcacaggactgttgaaaatggaatgagttagttcaagtaaagcacttagcacacactaactcgagcacttaataacattagcattattattccyataacccacccttacttggtttcactgcaggcaacctattattgatcccaaagtgcagttagatccccacatccctttaatttttgctctgctcgatgttcttctggcatgttctctttctgttgtgtctgcaaatcctccccacgtgtcaaggtcaagctgaagccctaacttctcctcatattctgactgttggggcctcccaacctcctccttctatagagtttaacagtttaacagtatctacctctacctgaacattttttaggaaatgagtgagtgagtcatggcctcattaggaaacaggcagcacctaaaaatgataatcaaagactatttatagaggagtggatagggttgagagaaccaaaaagagatggcaggtcacccagggactagcaacaggggaagcagttatcacccaggcttaaagggataaagagagggagtaacyactccctactactagacaccaatgagagccatcagagaggcctcctaagttgtggacttgacatagagaaacaccactactgccaaaccatttggaaagtggtgaatgaataccccagcctctatctcttccatgcttcacagtctcttgtaggcaattcctattagccagacccaactgaaggccagagcccagggagaggtccgtcccctcccaccctacccggagacacagaaaagggtggggaatggatatggaggggtgaagggagattagctagcatggacaggtttgtaacaagctacattcgcatggacaggtttgtaacaatcgtcactccattgggacctatcttgtattcattctgtggtctctcacgtgcaggcctctgcaagagttagcatgattaagtggaaaaaaacatggactttgaaatcagagacctcggttattatcatccaaaccctgtcatcttctagctatatgaccttaagaaagtaacaacttccctgagtttctgattctcaaattccttactggtaagatgagagtaatctagggttgttatgagaattaaattagagaagtaattccctattccctacttcctaactacttataatctccttaacacaaaggctcagwtgatgaaaaaatagctcagatgatgaaaaataggaatgtgcacatgtgctgatggacagaaaatttctgtgaattctaagtsatactgggaaattcaagggctttgtttggcatttgtcttaagctggcttgtctaatgagraaagcagaaagatatctaacaatttgtagaccttcataaccccrcaaatcagagtatggtccagcagcatcaccaacacctagaagcctattagaaatgcatgttctgtaccccttaccaccagaatctgcattgtaacaagatctccaggtgatttgtacatgtgtttaaggcccaagaagtcctgctttagaaataaaggaaccccagaggtcatctagattctggtcaagccaccccaatttatcaggacactgacatccaacactatgtaaattgtccaaggacactgtggcagatgctgcctattgactaatcctacaggctccaacctctcctctcatgctagtttccacttcacaagatggaaaagctaaatatcctcccagtctcccttgcagctaggagtgtttacatgacagttctgaccagtggcatctgctgagtgggtttcttaaaaatcttctgctttcttgggaggctgaggcaggagaaccacttgaaactgcgaggcagaggatgcagtgagccaagatcatgccattgcactccagcctgggaaaaagagtgaaacttcatctcaaaaaaaaaaaaaaaaaatctgctttctcagtaaagaggggcatgcatggagacatcaaccttccctgtttgtcctgccttaaaggaaacactgctctagagctgaggtgggcatcttgtggcaatagagccacaagagtaaggctaaaacagctacatgctgagggttgtagaagggaaagacacaaggaagctggtcctggaggacaccrttaagctgaggctgaatcaagccagcaatttcctactttcagccttcttgttatggaatatacataaataaatctctctttatggaagactccacttgtcaagttttctgttacttgaagccaaattcatcccacataatgtcacacagctagcaagtggctaagccaacgttaggtcccagggccccagagatttttcctatgcctcttttattcattaagtcagataaatctttcaaaaaaatttctataaacacatatggaatcaagggaaagtgctaatgtgagaatgcatctgtgcatgggaagagaggtgttatataaactcttgtagtgctggaaataatatctctagggcagataaccaggttcagtttagaaatgctgcatgtgtgtgtttgccaaacttaaaatggagacaatgaagagaggtgagggtgaagagcagacagatcttcatttcttcaaagaatctccactggccatttgtgaaccacatggaatttgatatatgaaatttaaataaatgttaggtacaattcctcatctgtgacaccaccaaatgtcatgttgatgcatcaatctctgcatattctattaatatatatttactgagttataaaaaatgcatgtttgtctaaccaaaggttgctattctcaaacttactttaaaaaaaaaaaaggtagggggaggagctagaattcattgactcagagaaatcacaaaagaaaatgaaagaagtagcacacccagaaaatgaaaaaacagcttccttccagaagtgggacagcctgctggaggaaatgccccctctgactaagcccagagaagatgctgaacaggcaaagccatcaggaccaggacagactcacctccctyccctttaccatgaggttttttgaaaagccaagggagatctcgactgggctcctgccaaaatcattctatcattttcaggtgaattaaatatgagctagcagacactgagcactcacagtaattcggtttctgtacagctacattctacaaagcagctttgayccatgctgctaccttgttgagctggccctgtccctcattttacagatgaggaaattaggaaactccctcaagatcacaaagcagcaagtgggaagaaaaaaatccctaagaccctgtaggatcttatgctgcttctctctaaactcactgtgacattcacctttatgttgccctggccaggccttgacactctcaccaccttccatgcccattcttactagttatgtctggtctctgtttaaaagttacttgtttaagaaatctctgcctcatgccctgccctggactgggtgtcctttgatgagctcccactatgctgtgtacctcttagcactttcaactgtcattaactaatcaaytgattgattacatgaattaaataatgatttgtttattctgatggtggcaccaaggggtagcttggtgttacgctgtgtgtggcaggactgcaggagggggcggtgagggagcatctttgactgctcaacaatctccatcggttcttcctcatcatcatccactccaaataaacagttaacatgagaagagacaagtcattttgcaatataagatcacctttaagtcaagtatctttgccattccctttctgtctcaaaaccagactaaagtcccaatccccaaccctgtagaaactttagaaccatttttgaaagtctttcactctgattagtgtgaaggttccatgaaggcatgcactatgtcttgttcacccttgaatcccagcacctaagacagtacttagcacacggtaagcaaccaagtatatgagtgaatgaatgaatgacttaggactcccaggttagtgctcttccaccataccactctgcctcccctaagattgaagcccacagaaacttctacctttgcacattctctacttcagatgaaagcacagccttgctggggtcaggggcttggaaaaacacagccccgacagacaattcttggtcatggttttagctgaaatgtttcatctcgcacgcagtgccctttcaggagggcagggctcccctcttaagccattcccagaarayawggagaggactcagacccaacagaattaacacaggaaagacagaacatttgagggcccagatgtccttctcttcatccaggctctcaacacrtggaataccgaaaccttttccagcccctttctcacaatcacctggagatgctggtttaaagatgccaattccaggattccaccctagacctattgaatcagaatctctgggggtgatctgaggaacctgtgtttttaacaagctctccaccaaaaacaaatgcttgtttttaacaaggattggagattttttaacaaacatctccaacgctgatacctgctactctgaaacgtcttgactctyaagtcacggcccagcctatgatgttcagaggctgaccatcagtttaggccatgccaggcccatgaggtaggggaattycatggaactcaatgrgactccattcaacctgacctttttttttgcatttttaaattagagtataacagtcaccaccagtggcgaatggcctggatagctgcccctgcagcctcccccagtcttatccatatcacagtctggagatctctgaccccgtcagagggagaggaaaactcaatgattgggacctggtttctgtcacttaaaaaaaaaaaaaaaaaaaaaaaaacaaagttcaaagttccagattgaacctgggtggcacaggaatgcaggggcttttctttgtttattttgaggaagagcagggacacattggcarccaaatcccaaaaccaagacggaatcacaaagccatttcccgggtgtcttgttgctcaagaatctccctctcccttgttgctgggtctagacgcagcctcctgttaaggcagaatacttactcactaaaagttcccattttacgtctaggaggggccaaggaccaagtcacaacaaatccaaaatgctcaacagtggttaatggatgctttcattctttaaaatatgggcacttttaggaaatatataacaaccagaatacctctccctaccaccaccaaaatgcacacagtgctcaggactgtttatataatttcaagkgtacacgggttccctgtagcctatccatggaacrctggcgatggggcccagattaagaacgatcataaacatattgaagaattaaaaacctgaaatgtctagaaaggtttatccacacctgaggaaattcaaggtggggatgggatgggatggatgaggacacaagcttgaaaatattctytttactcatgtcttgattgttaatagaaatcyggcagaaataaaatagatatatgcaatatttgtttctggtccttttattaatctgaagtaattttgttattttagggacattaaaaattcatcatacagaatttaatatactcataaaataatcatgcttcataaatttaaaggtataatmttggagatgattaaatatttactagttgaatttactttaaaaygttttatatttgttgtagggtgctgaaactgctaggcttttttaaaatctagggttagtttttgctggtttataagaagcattccaaaactgcaaattctttctttaaataaagaactgtactcttttttaaaaaaatccattgtccatctcacattcacrtgtctagaaggaggacaggtcctggacacttgctctattcctccacactcttgagacctgtcctatctcctgtgtgttctgagtcattagggcaagtagcaccacaggcacatagtccctgatcggccatgtgccgacctctgtactgattctcaaaagactaagcccaccagcaaaagaggcactaggtctgtctgccttttcytttaaaaatggtagtaactccctgaatgttataagcttacatttgtaccattttccattgatcctaagacacaccttatgagtcaccaggagcaacaccatcctttagacgacatgatacactgctttaactatagttatccagtcatgcaagcctctgattgctttgacgtttctttcattcatccaagatgtgccagcagtttctgctgtcactcgactgggcttgtgatggtcaatccttctgtgaaactcattaacagtttcttctacttaagggatggctcttcctctcttaggctccagaaagcagttcggttgttactttgcaaaaattatgcactattgtgttcattcctccaaccatgcrtatctgcttcactaatatcarattaaagtcctgctgctctgtttctacgcctttttgcacacaaggtaatttttcattttaatgtcaaatcatagtataattttttgaggatcttctaaacgcaattaaattcaacacctataccatcaacaatgcatccaattcaattgacatgatgacagtgtgaactgccatgatattattaacgactgtatctccacagagcctgaccaacaccatsagctgatccccagagatgttaggatgtgacagatgtgcattctggaatcaattaaatagggctcccacactgtaaccctgtgctcttgtcttaatgtctggctgacccgtggtcataactaaaatgaagaggaaaataattccaactaagaataggataatgatgaatcaaatagtcctttcacttcctgcaatgttctgactcctttccrttamgtgtcttaaagtgagggactcagagctatctttcttacctactcaccaacagtatgtcatgttagtttgctgtgatcttaatgacaatatcctgctacatctctttttcctccctcaatctgtctctttttctccgctaataacatggaaggggaaccaactcttatttcatctagctacactaatactacaactttgagtttacaaatttccttcctctsattttttaatcacaattccccataataactttattgagtagtagagagggggagagactatgaatttgtggatgatgtaactggracaaaaaagagttggtaggaaaaccaatattagcacttagcctcccaaacttgagtatcttgttctctgttgttctgttttgttttgtttttttgagaaggagtctcgctctgttgcccaggctggagtgcagtggctgatttyggctcactgcaagctccgcctcccgggttcatggcattctcctgcctcagcctctggagtagatgggactacaggcacccgccaccacgcctggctaatctttttgtatttttagtagagacggggtttcactgcattagccaggatggtcaatctcctgacctcgtgatccgcccaccttggcctcccaaagtgctgggataataggcatgagccactgcgccaggcctgttctctgattttaagacccctttgggaagagccatcccacaaacagaagaaactgttaatgagatccccaaaagaatctctcatcacaagctaaccttctggatgggaggaatgtatgtggattcctaaaagttgaaggctgcttctatatgttcagtttagtaagtactcctataaagacagtacacaaggcttgccaggcagggtactgtcgggtattccgggaggaaagtcattgctccagcctcctctgcctcataatctagagccgttctcaattccgggatgggggaagaggcagggagggggcacttcatcttgtgaatcagcttacatttacaggccccagaaaattgttccagatccctccctgaaaacacacacacacatgcaggatattgcaagtcatttcttgggattgatacagctcctggacattagaggagtagctcacgtctgtaccccataacattgagccaygaaactcacacagatgagctttttctcatggttagtcccacccaagtacaaagagaccaagccagtcaaatagtttcaggaggaagcaatagcctcccttggtgttcaggttttcttgattaacatctgtcaaagaaattccttgatccttccttcagacctggtgttttgtgaggccttctttcctggcagggttgatggtgaatatcctccagaatgcacagcaggccagggcacttttgaataatccacggccctccctgaggggcccgcccatgatacctcctgctccctgcataccccaccctgtgctccacttgtctcttcacagcccctggccaagatgctggagcctcagattgccttctgagccctcagaaagcagtgctcctcttaaagaggtcaggggaccccactctgccagaaaaatctctggccagggctatggctgcagagtttctggcatctgtgagttggcgagtggtcagggagtttccagtcttttacaactctcgaaaagcaacctgatttttcatttgaagtcaggatgttgaagtgtccctgaatcrctggggactgacatctgggatcggagccttgtcttgctggagccagagtctccgtatcacttaaggacacagaaatcctggtttctttcccacattaacttgtgaatacaaatatgaagctttttataagattccccacatcctgtcttagaaaaggagacagagttccagttctagagccacaaaggatctgttgaaactctggcattgcagccactttcttgtttattattcttcttctctggatgtcagtgtttcaaggccctgcaggggaagctcagatgtggcctcacttaaattattactactatgaattataatatatagtgctttttagttaaaagagtttttacygttattattattttaacctaatcttcatctgacctccccagtaattccatagtgtatcagctgcggtcccagcatggatcagatggccattcaaagagtttaattgaaaattgtttaaagaagggactatttacagagatggatcagtcagagtccaatcaggaaaacaaaaactgtgctgattattttaataaggtgaattaaatataaagaaaggattggagatctttatatgaagtatctaaagtagtcaattcgtagagacagagagtagaatggtggtcatcaggggctgggggacgggcaatggggatctgtttcaagggcagagagkttcrgttttgtaagatgaaaaagttctggagattagatgcaaaacaatgtgaagctacttaacaccactgaactgtgcacttaaaaaggttaggatggtaacatttatgtgtttttcacaataaaaagaaaaaaagaaaggggttggagatctgaatatgtgaaaggaatcataaaagtaayrcagaaaagcaactgtgaaggacaggctagcaccactcgggccaggaaacaaagggaagagcttagtgttgtcacccagaagctcggagcagggcagcagatgtgggtctgaggcctctgaagaggggctgcccggttattacaggtccttgagagcaagcacaaggacggccctgagagtgccagaaaaacacgggaggctgcatcccaaggctgctgtaggaaggatggctgctgaggatagtctaaggggaagcacaagcaaaaggaggaatgggtccctgctcctccctccagtcttgcaggctccccacagcaccctatattggcagaaccgacagagagctgctgacaaagagggatgtcttttggaacatcacagcccagtaccaaaaagcagggcataaaaaagggtggtgaggagctgagcaatatcagcttagtaatgggcagggtaaagggaatggtaaaacaatcagcaaccaggaacagcaggaagcaattattgcccctaagtctaaggggcaagaagaagggatgatgttatgggaaccttgtcagggccattagggacatggctgtgggagaggggctgcccagcaggatctgtggccatctgcttaaaccccagscaagcaaggagggaagggggcagagatgggggaagaaaccccctgacttctttctctctccctaccggctggtcaccatagcttaagaaggaatgtttaacatatatttaatcaaaatgggacctactaatatgcctttatctgcatcttcatctccccatctaaagataatagtgacaataaaactgaaatccctctaagttaatatacttcaattcattccttctcaacagtttagcagtaacttggcatgaacaaaatttgcttttaagcatgaaaaattggtgatttttaccaaatttattgaaagcctaacgtgccattaaaagacttggaactgatttttacaaacactaggaatataaaaagcagaataaatgtttatcacctgcttctcttgctcattgttgaaaaattgctttggattcaagttctctaaaatgggaatgatcataatacacatcacacaggattgtagtaaggatgaaatgagaaaaaaacaggtgaaagcactgtggaaagggggggttttattttctgttaccttcagctttccctggatctgggtgttctttaaagcaggggtccccaactcccaggccatggaccagcgctggtccatggtctgttggaaaccaggccgcacagcaggaaatgaggggcaagccagcaaagcttcatctgtatttacagccactctccattgctcatattaccacctgagctccgcctcctgtcagatcagctgcaacattagattctcacagaagcatgaaccctattgtcaactgcgcaygtgaggaatccaggttgcatgctccttagaakaatcaaatgcctgataacctaaggtggtgatgctagygctgtgtagtggctgcaaatacagattaacattggcagggaggtttgactgcacagagaccataataaatcaattacttgcagactcctatcaaatcagtgagtggcaagtgacaagctacatctggtggcagactttatagcaacaagtgagttgatgtccttcaattgtacaactgcatctggtggccttaaaagcacatttgagacaacttcaaatctccgtatcttttggattaaagtcaagttggaatgtcctgagattgccataaaagcactgaaaatcctccttccatttccaactttctatcattgtgaagcagggttttctgcagtgacagcaacccaaacgagattatggagtagactggacataaccaacacactttgggtgtcactatctcccatcattcccagatgggaccatctagtggtaggaaacaagctcagagctcccactgattctacattatggtgaggygtataattatttgatcatatatattacaacgcaataataatagaaataaagtacacaataaatgtaatgcacttgaatcaccccaaaaccatccccaactctggttcatggaaaaactgttttccacaaaactggtccctagtaccaaaaaggttggggatcattgctttaaagtaccaccatcacaatcaccatcataatcactgccatcatcaccatcttcatcatcactatcatcatcattacctccatcagcaccatcatcatcattatcattatcctcatcamtaacattaccttttttccaggccctatatttctttgccctcagggccttcaaaattttatggagcaaaaaaccctcttggagggaaataagagatgagatttggagtcagaagagtkgcgttggaatgctgggtttgccattgactaactgtaggatccttcygagtttcccagttttctcatctgttaaacagaaatacctacctacctctgttgattattttccctttgcccctccaaatccattctctkccctccctttgccatcttattttgtatcttgtaaggatgacttttacagaccaaatcacctaggctcccttgtatgtgtatatgtttgtaggaatattgatagagggctggaaatatacatatcaagcttaagttatctgatttaagaaagcagtagtggtggctgggcacagtttgttgctattttatgagcaacaaagtgtaatyccagcactttgggaggcctgaggtcaggagttcaagaccagcctggccaacatggcaaaaccccgtctctactaaaaatacaaaaaaatcagctgggaatgctggcacgtgcctgtaatcccagctactcaggaggctgaggcaggagaatcacttgaacctggggagcggagtttgcagtgagctgagatcatgtcactgcactccagcctaggtgacagagcaagactctgtcacaaaaaaaaaaaaaaaaaaaaaaaaaaaaaagcagtcatggtgatagtggtagaaagattaggtatggaaaaaagatgagcaaaatgaaaaatatttacatgtgaaaatattctgctgagcaaaaaaactgagacacaaaatcataactatgtctgatgtcatttgtgtgacattctagaaaatgcaaactaatctgtagtgacagaaagcatatcagtggttgcctggggccaaaaatggaaggagagattaaccatagtagggtatgagggaactttctggggtaataaaactatttggtgtcttgattttggtaatagttacaagatgaatacatttgtaaaacctcaaccacttgtacaatcatttgtactagtttattattatatgtaaattatactcagtaaagttgatctgaaaaatacttgggctaggagcagtggctcacacctgtaaccctagcactttgggaggctgaaataagaggactgcttcagaccaggagttcaataccagcctgggcaacacagtgagaccctgtttctacaaaaatttttaaaaattagctgggcgtggtggcacacacttgtacttctagcttacttggggggctggggtgggaggattgcttgagcctgggagggtcaaggctgcagtgagccatcatcatgccactgcattctagtctaggtaacaaagtaagaccctgtctccaaaaaaaaactcatggcataatataaatggaagagatatataayagaattctagcagtaatattactgtaagtctgtacaacctaaatgtacacacaaggactaaaaggtacatggaccaatgaatacatcagcttggtgcacagatgcctgctattttatgagcaacaaacaaaaaagaaatgagctgaagaaggctcctgaagacagcaatgcctacccagcaatgccaaactcaatgtaaggttgccctttacagaaatatggtatgggagtaccgaaagcaacaagaggaaataaaactgtctataggatcctgatgggggtctcattttacaataaaaagagctttatgcaatggactcgagttataataagcttaaagggagaaagagagtggtctcaatgccactgtggccaaataagattcctaaattgctttccaaagatcaatttcttattttgtaagcaaaaaataacactagccttcaaatgccaacttttcaagaccccaacttctactgtgaaatattcccaaagacatgggaagaaacatctattgattcaaacataaaaggtgtttggctcatcagccctgtgctaatggttcaagaaatttaaaacaacataattaactccctgaatttatggaactaagcagagcccatcctctttatgtcagaccagtggccctcatcctggccccagatgcatcttcagaacttttaaaagtacagattcctgaaaacaacctttggagtttatgacttaggtctaatgttgagaaccctctgctaggcactcaccttggtatttttatgcactccaagcattccaacatagcccttggagcacctgccattttctggcataaaagttctgtggtattctttctgtactctccccaactctatggcccgaagattttaaagatatgcaaagcatcttccattcccagctgagactggacacacctgaaataggtaaaagtgacagaaagactggatggtatggaacactcttccaagtttccaggaaaagggctcaatctgaaacataattatttcatttcttcctttctacttcctaagcattgatggttcagttaacaaatggtacctgagaagcagtgttagcaccttgatgcaatgaaagtacaaggaaatgagacgacctcctgacctgcttttgacacccccacatatgcctgcctcgagatcttggcttctcaagggcatgaaaaatcagctccccattcatttcttttaaaaaaagtttatttcctgcttcctatgtacaagccctgttctaggcactggggacacagtagtgagtgaaacacaaaagtttccttctattgttggcttacagtccagttaaaagagacaagtaaaaaacaacaacaaaaaatagtgtcaaattatgatttcaatgcaagaaattaaaaatatgttgttaaaaagagtgaaggggccaggcgtggtggctcatacctgtaatcccagcactttgggaggccaaggtgggcaggtcacaaggtcaggattttgagaccagcctggccaayatggtgaaacctcatctttactaaaaatacaaaaaaaaattagccaggcatggtggcatgcacctgtagtcccagctactcgggaggctgaggcaggataatcacttgaacctggaaggcggaggttgcagcaagccaagatcacgccactgcactccagtctgggggacagaggaagactccatctcgaaaaaaaaaaaaaagggtgaaggccagagtcacagaaagacaaacactgcgtaattccactatttatataaggtatctacaatagtcagacacatagaagcagagagtagaatgctggttcccaggagctgcagggagggaaggatgggatagggagtgtctattcarcaggtataaagtttcagttacgtgagataagaaagttctggagatctgtggtacagtattatgcctattataaacaatgctatattgcactgttaaaaacttggcaagagggtaggtttcacattaagtattcctaccacaatgaaaaagatgttaaataaaataaataaataagtgaagagcataaagcaggacatgggagtgggcagggagatgaggaggagtcggggggccctttcttccctccctttactcctgcctcagaaggtaacatctgagctgagctcaaggaaaagaatgaaccagcatgcagagagcctacagaacgagcaatgtgacagctgaggcctaataggaagcagaagacactcacaagggacgatgtgcaaaagcgcaggtagagcttaatgaaactagctacccagggctaccaaaagtggggggaaccatgagcacccctggcctgcagggacaaagggaggagtggctaccaaaagatggagaagacccctgataggagctgtggcctttggtaaagggatgcaaccatcctcaggtaactagccagcaaggaaggagcaggggtggggtggtaaataccctgaataaatatctcctcctcattctctctgatctcctgctagtgcttcccattggccaattccaacaggaagtcaggaagcaagagtgttcatcgatgcaattcacaccatcagcctactggcacacagaacaagatgagaaagactgaagattaggtctagaagggcaaatggaaggcatcagcataaacaccaagtgcaaaagcttgcaatgggaaatagcacagcctgttcaaggagtagaggggccactgtgctggagcttcttagacaaggtataggatgtgacagacagaagacaggaccctgatcatgtggggccttttatgccatagtgaggtgctggtatttaattctgtgcccaacaggaagttttttagaaggttgggataggacatagaaccagatctcacttttaaagaccactttgcctgctgtgtgtgtactacagtagtggtaagggtgggggcaggaagcaaccagtgcagcactcaccccagaactcacatgtgcagagaaattacacttctgcttcgcctagatctgatctattcttgcttgctagctcctatgcactatagaaaaacaaaaaagcaggggataacatttagatcaatacaataatttaaatctttcttttaggtaaaactcggccactttggttaaacatacttagtctctagatttcagcaacatccctggcccccaggacagtgctgggcaaagaagtgtacatgaccttgcagattgggggtaaaagtcctcaaaaccatgcagggtcttttggctccccagcaatgtgccttattccccttgtgattagccctcaatggtgtcattaggggctatggctgaggctgcagctggcaggcatcttggtctatgctccctctcagctcagttggacccagtgactccctgtatgacagcctcattcatttcagctctcacgggcattacaaacccctttaagtctctgtaaatcccctatctcaacaggcctgtgtaggccttgtcagctctcaagtctgcattcatgtcttgggagaacagaggaagtactggggatgcaaattagaccatcactctctctgaccacatctctgaattgatttcatgtggtcaccctccaggtttgccaagaaggtccctcaaggagcttccaggtgatctcttcccagtgttccaggctggaagcaaggaaggaacctctctgccccatttccctttaggaatttaacagacttcccactctccagggttgagaccagaaggaagatcagagtgctgaactcaccatctacctcttctgacccccttctgtcttcctcctccaaaaatctattcaggctggagtgcagccttcattatcatagtcatcatcttctgaactgcagcctcaatgagtgcagagcattaatggtgaatagaataaacattctattaatatatgttatcatagaaatttacagtctaattttccaggcctactccttgctacgaaaataaaaaataaaaacatttaaaaatcttttctctccctacacggactagtttttaagcctactgtctttctgcagaaccccgtttttgaatgtcacaagccaaatcttaactcttccttttagtttgcattcatttatctcatctcagaggcagatatattcaggaaaaagagaaaagcacatgaaattgttccaaaccatggccatcattacatctgctaagaacctatcctaatgttctgggtgagaaataaccatagcttgatacctgttggaagtggagtagagagtaggagagataagtaaaaggaggcaggatgaggaaatattttggaggtagaatcagcagaattggctgatggattagatggtaggggtgaagaaagctgaggaaccaaaaatgactcataagtcagtaatagacagttggttgtccatttttacagaaatggggaatcctgggcaagaaactggtgtgcagtgggaaaagtcagggattctgttttgaacttattaaatttgaaattccaatgagatattcaagtaatatgaaacaggccactctgatgagaggtcagagatgaggataaaaatttgggaatcagcagcatacagatggtacgtcaagcccactgtagagtatgaagaaaggtttcttctgtgcatggaaggcaccggggctgaaatcctccataggccagcccatgtcaggccaaagaagaaaaaacccaaccactcccaaacctcctcaagccaagctctcagattcagcataacatttaagatccagaatcaggcgccacaaacccatcttgaatttaycaataaccacaagagagagaaaatgtatacgttgaaattaggtcatcattattgtacaggattttgtttcagagaaagttgttaagtgtttatttgggaccagtcgtcacggagaaagcttcctgtgaagcaggagaccaatgagaaacagcattttctaatagcttggacttttctatcaacgaaggatcttgtgatacatcaacttttcagcccagaagccacctggagggttggttctctaactagtcaaattaaactatggtttagtytttggccatgttctctaacatttttrttgctggtaggaatcgggagaaaakaatttacaggtctctctaccttaatggaggaaaaggaccacagtggggagcttgaggagtgaaataaataatactatttccaaggaaatagccccacctactgaaacaaatttccatctgggttggggaggtaagggaggtaagattggagttttttcaggaactatgactacttaacaactataaccttcttgctccctctagagggcaaaggtatgaataacgtgactgtaaagaaaaaaaccgtaatagaagccatggcttcatttttacctgcacctttcttcatcactttgaaataagtattttaagagagagacaaaataaaggaaatgaattaaaattcctctggcactttccacatactctgacatttgaagcccaagaaatgggggtgctttgcaagcaaagtcagctctatggcactaatcaaatacttaagactggccttataagatggagaaatggtacaatattgcattgcttttattaatctatttctctaaagagctaattatttattctgaaaacaggaggattctgtaagatggtgttccttcacatgtaaattcattttagaagaataatggctggactttgtttgaggttttctgaattttaatgaggacatcattcttgccaggcaactttgtactctggatataggtgcacatgaaagttaaattaccttattattctaatgaatctactctgacaatagcctggtataacaatttgtctacctagatccagcagctgaatgaaggaaacaagtccaggagtcaaagacaataaacatgaataaagccagttctcataagactgttctccaaggtttcagtacaatggttccaaagtagaactgagactaattttaaaaagcttcatttcagcctaatgattttacaatagaacagacactgataacatttagacagaaggagtaatatctcagagctgtgggttcaatttgggtaacagtgttttataaacacagagccagacggtaaattgctttagctttcaagattattgctgcaataattaactattctttcagaacaaacatttgtcaccacaggcaatgaacagatagcaaaagacaaatcacaccatgacaaagtaaaaatagcaaaaagggaactttacaggtgattccgtccaatttagcatgtgatgaaagtggcatctcaagccactggggcaaagatgtactttttaataaatggtgtcaggacaactgggtagccagttggaaaaaaatgaaataaaattagatctgcatttcatgccgtacaaaagaataaactccaaatgtaccagagacccaagtacaaaaaataaaattatacaattactggaagaaaccatgagtaaattactctctgatctcagtgtagagactgacttaaaatagaggcaaaaaaagataatttgaccacataaaaatgaaatataacacatggtaaaacagcaacaccatcattaccataaacaaagtcaaaagacaactgacaaactaggagaaaatatttgcaacagacattcccctaatatgtaaagagcttttgaatatcaagggagaaaggaccaaaaacccgatatcaacagacaagtgaaccaaaaatatataaaatgaaatacacaaaatggcccttaaatatatgaaaaaaaatgttatagttacaaaaatgcagccaggcatggtagctcacacctgtaatcacagtcttttgggaggctgagggaggaggattgcacgagcccaggagtttgagaccagcctgggcaacgtagcaagaccctacgtttacagaaaaaattttaaaaattagcagagtgtggtggtgcacatctgtagtccccgctatttgggaggctgagataggggatcacgtgagtccaggagttcaaagctgcatcatgccactgcactccagcctgggcaacagaataacactctgtcacaaaaattaaaaaaaaaaaaagaaaaatggacattaaaacaacactgagataccatttcttctttatcagattggcaaaaattaaaaagtatgacaatatattctgttatcaaggctgtgggagaatattcttgaacactgctggtgagaatgaagattggtagagccctcctggaaggaaatttaacaacccttagtaaaaattatggatgcatttagctttcgtcctggcaattctacttctacgaatctactctgaagttaaacctccaacaatacaaaattaatatgcacaaggttatccactacagcattgtaattacgaaatattggaagcgacctagatgctcaatgttcatatgtaagagtggttgaataaacyacaatgtatccaacacaatgggatactatacagctataaagaagaatgaagatctctatgaacttatattgagtgatttccaggacacattaaatttaaaatgcaaaatgtgaaagagtatctatagtatgctacctttcatgaaaaacagaaaggaatgtaaatatatatatatttttctttcatatgtatattcatttgtacaaaagaataaactggccaggtgtggaggctcacgcctgtaatcccagcactttgggaggccgaggcaggcggatcatgaggtcaggagttcgagaccagcctggccaacaaagtgaaaccccatctctactaaaaatgttttgtgttttaaaaatacaaaaaattagccaggcatggtggcaggtgcctgtaatcccagctatttgggaggctgaggcaggagaatcacttgaacctgggaggcagacgtttcagtgagccaagatcatgccattccacttcagcctgggcaacaacagtgagactccatctcaaaaaaaagaaaaaagaaaaaaaaagaataaatcataaattaatgagactggttaagagtaagtgggaacagggcagaagggaatgggaaaaagaaacagagtaatagtcataaaggaggagtaaaacctttctaagtataccttttaaaataattctgactcttaaaatcatacaatgttttacatacccccaaaataaataaaccaggatgtgaggaggaca

SEQ ID NO: 9871 - DNA, 13056 bp, Homo sapiens
ggtggtcggacattcagcaggactggcataacagattatctgtgtgtcaatgtacattttattcatccatcgtttgggtcagggtctgcaggcagacccctgcagctaatgccctcttgtgaggagcaattcctcagrtatatacctaataatgcaattacttggtaaattgtattttcaaattaatttctacattgtttttaagaatattaaaattgaatrtgtttttgaatattactcagaattttttaaaaatacaaatattttgaatatcttatatacacaatcatataagtraatagagacttttactttattctttcaaattctcatctttttttctataatttttcttactgtattatactcttttgggcatmtagtgcagttctgaatagaagtatttataagacatctttgactttacctgaccttataggagaaatattgaatatgttttcattaatataattttagctgtattatttttatgtgtatctgtaaaattagggtagttacatctgtttctagtttactcagaaatcttacaaaatagtagtggtggagggaatggaaatggttaatgggtamartaatatagttagaatgaataagatctactatttcatagcacaagatgattacagtcaacaattatttattatacacttaaaagtaaataaaagaattggaatgtttgtaacacaaataaatgataatgcttgaggtgatgcatactccatttaccacactgtgattattatgcattgtatgcctgtatccaaatatacataaaaatatacacctatgatgtaccaaaaattaaaagtaaaatgttagtataaaaattttrttaaaaggataaaaatgtttaaattttatatrttaaggtgatcatytttttctatctttggcagtgtgaagaagtatatctataattttttaaaacaaattatgtactagaatagccttcatttgtttgcaatgtgttattctcttgatacaacattgtattctatttgataatttttaagggtatttatatctgtgcttataaaacacgttagtctttaattacctttcctcagaatataattgactggttcagttatcactcatgaaaccagttgggaaatactctatactctcaaagactttggactctactggtattagctcctttgtaaatgttgagataaaatcacaaatgaaactctttcagattgaagactttttgagtgactttttaaaaattatggattaaatatttagaggaacaatgatccaattttgtctttcttgtttaaattctgagggtatatttagaaacaacatgtcatttaaactatgatatctagtgtaatgcaaaaatattctgcattgtattcactgcatgatttaaatatgtttaaatgtgtgtgagatctgtagtaatggctcccacttccattaacagtatraactgtgttttctctgttttctcatgatcatttctgttaaaaattttatgtatttattaaactatttaaagaacaaaytttccacattgttgattttctccattttatttgacttttattgattttaaagaaaatgtggtatatgcatagaatattatttaaacttaaaaatggaaattctgctatttgcaataacatgagggtattacactaagtgaaataatccatttatagaaggacaaatgtggcatgattctactttaaatgaagtttttatactagtgaaactcagaagtgaataagacaataatggtttccagaagttaaggggctggagaaaatgggaagttgttgtttagtgagtacaaagttgaagttatgatagatgaataattttagtgcctgtagtaaacaatatagtagtgtgaagttcaaaatttgttgagggcagaccacatgttaagtgttctcaccacaaaataaaacaacaacaacaattaccaaaaaaaatawaawwaaataaaaaaaagagatccaagtaaggttactttgtgaggtaatgagggtttaggactctaacatatacattttcaggggctacaattcaactgataataatgactagacccaaaatattaatcatggttgagggcaaagcactttttagtcatataaagttttgaaactatacttcccatttatcatactttgggaatttacttaaagatttgttccagaaaaattgcaaggctatctgtaaaataggaagataggaggtttgaggaacaggggctccaaaaccaaagagaaataaaagatattctcagcaagacacctaagtgcaaccatttcagagcagaactacagaactggtgccactgtgagggatgtgtccaagaaaaaaaattaaatctgtgtctgttgggatactttatattacatatttttgaaaagataatatagaccttcaaaggaaatttattggctctcacagcattaaagatgctggttcgattttatataagagttgtttgtataactaaaccatgtaatgagggtcaattttgttttaatatttggtgttaaaattctgtatctcatcttgctcttaaggttagttccccacttgtatccaacatattttagcagctctcaacttcagatgcttcctcattcactcagagaaaacaaatgcacctctgagtaaatgtcttaagattaattttgattagatgtgaagacctgattggaccttagagaatatatcattgtatatatacaggaatgcaaaaattgtaaatttggaggagataacattaacgaaatgttggyatggaataatggakaagacagactaggccagataaagaatattactgcacatgcttttaatttcatgctttatttgcttaagtagttctgtcttaaggaggttctcagaaacctcmactgtgtaataaagagatataatttttcactccagataaccacattctaataagaactacacacacaaacacacacacmtatatatatatatttgagtctaagattagagagaacatgtttcacatcattagagttaagaagaaaaatggctacataattggtagtataaatttcctcaatttgttttgcaataatcacttatatgaagttttcaagagctaaaatataactaaattttatttagttatattttatttaagagctaaaatatttagagctaaaatataaattaataaaataatagtttaaaaaatgactataaytggtgatttactgtgtacaagacaaagttctaaatgcctcagaaaaatttgtatctcaaatctacccaacsaaggaaatactattattattcccatttatagataaggaaattgagatgtagaaatgatacacaagtcattcaaaattttactgctagtttgtgacaaagtcagtatttgtacaccagcagtcagactccaggattgaaattttaggtatttattagtaggagttttaaaagttgtatatgtaaaattttggtggttttggttttgagaattcatgtatagaaaacacaatggacaaaaagatcatgactttgtgtttttatgctaattagagaaattcaagtcagttatatttggtctgaaaaaactaycrgtgaagakaaatagtttaagtcagaaagcctactatggtagttaaaatgttggacatgaatttagccagttyattctgtatgaaaaaggcctacagaattgggccacacattcacaattaggtagagatacaattatctgtttttacatatatcaaggataaatgacagtgagagtgtgctttagtcccacttcttgaaattgtattacctacactttagcttgcttctaccttccttgagcttttctgtgtttctagagcagcacccaggagttggtgagcagtctctgaggactcatttgcagagctctgtataaagtagagactaaaattagatgtattcttataatatccctgaggttctagaaacctaatattagcacaccttccaagtgctactcagaaaagggactaagtactgtgctgcccaatgttatgtgtaggtgttgattcctatggaagaatgaggtgaatcagcygctgatttctggtgagcaggtgtggcagtgcatggagagatatatgagcagtgcacactgagaactgggccatgtggctgacctgcaccaggcagcgaaaaaaagttatatattaacatgtaatgtataaaattataatatatgaacatattatgtatgcattaaataatagatgcccaaaatatgtayaaattatgttttaaattttaaaaattatgtgtgaaatctctcatgaatatccaagttaaaatgtcatcctaccaattgcgttaggttaaatcagtttctatggtagtaggaagamataagggtagtggagacctacttttgagagtgggcacctagatttaatccttaagtctatagcctgggtgctgtcattatctttctgctgagcaattatattttaattgtccagaatatcaatgtttttatacaatacaataagagtcagtgtactttgcagcacttgttctctctctgttggaataatctcaaaaggatgaagagtttactcttcaattccgtgctgaaacacagagctagaaattgatgctagcaactgcttcatctgatctttctctttctctctctttcccctttgtttctgccccagaagaaggagcttcacctcaaaaaagttatttttgacttgatatatttactgtattaaaaaatgataattaaaaaatgattagaaagtgaaactatgccaaagatgaaagtacggatcttttaactttattttgaattacaactgctgtaccaaggaccccagggcaagcctccttagctcattttgagtgatttggtttatttgcagcattttaaaggtattacttaagtatttttcttcattccttttagactattgcaaaagttgatcgtttttcagttgacacaatgctatccaagagaactacaaaaaaaaaaaaaaacttctctatcacaaatactatctgagattgtccgtgttgtcttctacccacatatctagtgtcttgaagtggtagaaggagtgacaaataagtattggctccatagtagaggaaaaattaacaaaggtaaaattaacaggtgctctaagaatacctggtgtggggtagataataaacagagtgtgaaaatggcattacacagccttcttatccttttccacttgaaaatcctaagcctggaggtcataaacaattgctatttctacttctggccaggcatcacaggaaccagtacttttctgagaaatcgatgtttcttatastctgcttcagtatctgagaggctactgggcttgggtcagagtttttacatatgtatctcaaggccagtcaattaaagaatttaggtttttattgcraaagtgcctatgtacatgaggtcttatgatttacattcttatgaatcacctaatgacactttgagggtctgtgtgttgtattcacatggccccatgtgctgtcttgatatttccaatgttactmaacagagggtgaattcccagagtaaaataatgtattacttgctttcaaagtgagtggaaagtattaattattagaaatactcaataaggttgttgcaaatctctatatatagaattagaacccaatcaacaggcagaatgaaaattctgaatttcaccatgccctggtctgtataaatggctaaggcaatgactcagtacaggagtttctgaacccgcctgcttgcayagtaaatgtgaattcaattccgtgctgaaacacagggctagaaattgatgctagcaactgctgtgctagcagctgctatgctagctgctatgctatgctagcaactgcttcatctgatctttctctttctctctctctttcccccaaaagaagaaggagcttcacctcttcagaacaatgcagtgcaggatggcataccatggcaacaggggcacttytcacccagccacattttttctcattggaatcccaggtctggaagacgtccatatgtgaatctccctgcayttctgctctgtttaccttttggctttgctgggaaatgctaccattctgytagtcatcaaggcagaacagaccctccgggagcccatgttctactttctggccatcctttccacaattgatttggccctttctacaacctctgtgcctcgtacgctgggtatcttctggtttgatgytcatgagattaactttggagcttgtgtggcccagatgtttctgatccatgccttcactggcatggaggctgaggtcctggtggccatggcctttgaccrttacgtggccatctgcaatccacttcactacacaaacatcttgacatsccgggtgctggtgggcatcactatgtgcattktaattcgtccagttctgtttacactcccgataatctatctcatctaccgtttaccattttgtcaggctcatataatagcccaytcctactatgagcacatgggcattgcaaaattgtcctgtggaaacatccgtgtcaatgctatctatgggctctttgtggtctccctctttctcctgaacctggtccttattgttatctcatatgtttacattctctgtgctgtcttctgcctcccatcacatgatgctcggctaaaagccctaagcacatgtggctctcatgttggggwcatctgtgttttctatatcccgtcggtcttctctttccttactcattgatttggacacaacattccacattacatkcacattcttgttgctactctctatttggttatcccaccctctctcaaccccatcatttgtggggtgaggacyaaatggaaacgagagcgagtgctctatgtacttactaaaaaataagattctgaccatgttcttttactaaggactttgatctcccctatgaagaytgatacgttcttgctttaaggaatatctcctaatccttaccttattcctgtcaatttgcagtacaagttggtttgttcctggatgctgactaatggattttaacagtggcagaaacttccatggtatctcaagttcaaagactgacaaatattctgggaaggatatcctgggaaagtgctgtgtcrcctygcctgcataacttcatgcagaayctttgtttgcagcaggctgcttcttttatggggaaagaagatattatactgagtcttttatgatcagtgattacaaatatgtggcactggaaatttaaccctgtaaactatgtcattcattttcttttcttccttttttctttctttcttttttccttccttccttccttcctgtatttgattactaatttaatttacattcatattgtatttgttttatattttgaataattataactgcatgggataaatcaagaaacaaaactaacacaaatgtctgcsctgcggagcttgccttctgctacatctggccctgtggagcttgcattctgttaygctcttataaagccaagtccatgggctcaaaaaaatcattgccaaatctgtagcttcaagtggaatcatctgccaaatgtgtaagtttctgtgcaatcatarccaaaacaaacatataattttaaaacttttactcactgataccaacagtaatttagcactgatgtaccctttgcttttaggcttatagcatagtcacaagtgtagtttttaaaatctagtaatgtataacatytmtatgtgatatatgctggcctttgcctatcactttaccgagttgtgtttttttccatctacatttgattctaaaatactctatcctaaaattcaaggtttctcatcttaggtctatgatttatttctagatcccctgactttaatgtagaagctgcagattaacttatgcatagctacttttcacatgagacagagggctttcaattgatttaaaaatgaagtgtcttaagaccagcaatagagatttgcatcatcaaattagtaacgttgttttatatttctaatgactttaattattttatcttttagactgttaaaaagaaactagttctaaaatataaaaatgtattttttcctgcaaaccagaattaacaatttttaacactgcacttatctcacagataacgcttaataaaatatatgcaacatgaaagttcatattacctttatcaccactccaacacagtttccctcctgattttagaggcagtctggcatgtgtttttctgatatcacagcacacattttagttttayaacaaatcatagcatgtctattggatcactcgttattattttatataggttaaaatactttatgttttgttttgtaacattgatgtcattaatgtattcctgtgtttatggacatttgagttatcattatttccaattagaaaatacggtgcacatctttgtggcatattttacatttttatagtaattcattgaggctttgtactttgaagtagaattattaagcaacagaattttartgaatcagaacatatttstgcttcttgatctttatttttgattaagtacttygaatatcagaatttgtcgcgctttgtttttgttttttggtttttgtttttttgactgggtatcactatgttgctggggattgaatttttgggctcacrcagtcttcctacctctgcttctgtagtagttaggactacaggtacatgccrccgtrcctggctacatttcacatattttgattttttttctcacttttatgttttccattatttcatttagttcttgttttcaaaaatcccatttctcactgatgtttgacaggtgcatatgctatatttcttcttctactaaatattattaaaatttttaactttcctagtttcattttctgttttctaataaaactaatttgtccagctggggtaacatagcaagaccttgtttctgaaaataaataaataaataaataaataaataaataaataaataaagcctggcayggtggcacaaacctgtagagtccctctttctaaaaattagatatataaagaaagtaatttgtaactagyatactttgaacaaacaaaaatattagtcccccttaggttttctgtttttcttgtacatttatttctttcatgttgtgattatctgcaatcytgtttccagttttttaaaataatattcaataaccatttttatttgatgatatatattattaacaatttatttctacaataactcttcatgaatatattcttgcttaccrattcttaggagaaacatctcttgcatttttgacccaagccatattaccagccacaatatacccctgctttggtaataattctaattttatgtctaagtatgttctaatttgccctcatatttaaatgataaatcaaaaatttataaaattctgaataaaattctgttctatcatctttcttaattcatcattcattcagttgtttatttttggcatcaatactcttaatkaaacatatgatactgatcattttctcactgttttaaaagaacttttcccctcattctttggaaagcatgtttatttttcatattcyaaaattttaatacattgaatctcgatttataatttttagagtcatgttcagtatataataggtccttatattctgagattttatgtctctattacttctagaaacttttcagactttatatctttaaatattttcttctcaaytttctttccatattctttggtaagtytttttaaataaagataaagtagaaactccttatttttcttccatgtattctaactttttttcttttcttctatcacttgatctagtttactttgatcctgaaattcatacgtagattcttaaaattaacaattttgattttcagtattttgttgtatatgttatgattgttccaccrtctctctcccwcttctcaggcttccttattcccygagacacaacaatatcaaaatttggccaattaataaccttacaatggcctctaggtgtycaagggaaaggatgagtcacacatctatgactttaaattaaaagctagaaatgattaagcttagtgagaaagtcatgttgaaaggtgaggacggcygatagtgaggccttttgtgccaaaaggttagccaagttgtggatgcaaaggaaaatactctgaaagaaattacatgtgctactccagtgaacatatcaacgataaaaaggcaaaacaactttattgatgatatggaaaaagtcttagtggtctgtatagaaaatcaaaccagtcaaaatattcctttaagtcaaagtctaatccagagctagggtctacttctgtttaattctatcaagaaygagagaagtgaggaagatgcagaagaaaagtttgaagttagcaaaggttagtttatggagtttaaagacaaaatgctgtttccataatataaaaggacaaggtgaagtagcaaatgctgatgtggaagctgtttgaacttatccagaagacctattatagccaagacaattgatgaagtgactaccctgaataacagatattcaaggtcgacaagacaaccttatatcrgaataagatgccacctagcactttcatagstagagaaaagtacatgcctggcttctaagcttcaatagacaggcttactctcttgctgctactaatgcaattgtgactttaagttgaagccattgctcattttatcattctaaaaagttcagggctcttaagaattatgttaaatctactctgcctgtgctctgtaagtggaacaacaaagcctggatgatagtacatctgtttatagcatagtttactaaattttttattttgttttgtttttgagacggaatctcgctctgtcttccaggctggagtacagtggccggatctcggctcactgcaacctctgcctcctgggttcaagcaattatcctgcctcaggctcccgagtatctgggattacaggtgtgcacaaccacgcccggctaatttttttttttttttgtatttttagtagagatggggtttcaccatgttggccaggatggtctcgatctcttgaccttgtgatccacctgccttggcctggcagggattacaggcatgatccaccacgcccggccatttactgaatattttaagcacactgagcacacttactgctcagtaaaaaaatattcatttcaaaatactactcattgacaatgcacctaatcacccaagaattctgattgagacatatgtgattcatcttgtttycatgtctgctaacacaacatgcattctgcagcccataggtcaataagtaatttttactttcaagtcttaatgtataagaaatatttcataaggttacaattgaagtagataatgattcttctgatggatctgggtggaataaattgaaaaccttctggaaaggattcaccattggagataacattaagagcatttatgattcatggaggagatccaaacatcaacattaacrggagtttggaagaagcccattccaacctcatggataacgttgaggggttcaagacttcagtggaggaagcagctgcagatatggtkgaaatagcaagagaaatggaattagaagtgaaacctgaagatggaactgaatgctgcaatctcacgacaaaaggttaatggatgaggagttgctatttatggatgagcaaagaaagygatttgttgaaatgataaataatttagagtattatataatataaagtgagtagatgaggcagcagcagggtttgagagaaatgactaattctgaaagaygctctgctaagggtaaagtggtacaaaatagaattacatggtacagaaaagcctttcatgaaagaaagagtctattgatttgacaagcttcactgttgttttattttacgaaattgccacagccactccaactgtcaacaactaccaccctgagcagtcagcagccatcagatgatcattagcattttcttcaaagtactttttaattaatgtatgtttattgcatttttatacataatgcaattgcacacttaatagactatagtatagtgtcaacataacttttatatgcattggtgtcatagtctgtgttcctgataatagaatacctgaaaatgggtaatttataaataatataatttatttcttgtggttatggaggttgagatgtctgaggttgagggcccccatttggtgagatacttcttgctggtggggacyctgcagggtctcaargaagtgtggggcatcatatggtgaggggggctaatgtgctagctcaggtctctcttagttccattcccattaatctcttaatccattaatccataastagattaattcattcatgagggcagaactctcatgacccaattatctctgaaaggccccagctttcaatactgccacattggaggttaagtttcaacatgagtttcagagactcagacattcaaactatagcaagcaggaaaccaaaatattcgtgtgactcactgtattgtgacattcacttcattgcagtggtatggaactgaagctgcaatctctctgaggtatgcctgtatttgaattcgtaaactttcagaagtttaaatttaaagtttgtgtgatataatcaaaaagactaaagagtaagatgacaaatttaactttatgtttttaagtctgtgctttacatcttaaacttgattgtatcttcmgtattgtttaagatatcttctcmcgcatgaagkaaaaagatagtaattctcccatttawtataatgttattttagtgagaatgagaaatatatatatacatttgactgaaaaacgagggataaaatgttagaataaatgagaactttcacaccaaatgtatagacttagtgacatgagagttttctccatatggttttcatagatcagatgtctaagaagaaggtgttgttatgagctgagttatgtgataacaaaaactaacattttaaaatcatttaaag

SEQ ID NO: 9872 - DNA, 13014 bp, Homo sapiens
acatgtgccatggtggtttgctgcacccatcaacctgtcatttacttaggtatttctcctaatgctatcactccccttgccccccaccccctgacaagccctggtgtgtgatgttcccctccctgtgcccatatgttcttattgttcagctcccacttataagtgagaacatgcagtgtttggttttctgttctgtgttagtttgctgaaaatgatttccagcttcatccatatccctgcaaaggacatgaacacattcttttttatggctgcatggtattccatggtatatatgtgccacattttctttatccagtctatcattgatgagcatttgggttggttccaagtctttgctgttgtgaatagtgctgcaataaacatacgtgtgcatgtgtctttatagtagaatgatttatagtcctttgggtataaacccagtaatgggattgctgagtcaaatggtatttctagttctatatctcagaggaatcgccacactgtcttacacaatggttgaactaattttcactcccacagtgtaaaaatsttcctatttctccacatcctctccagcatctgttctttactgactttttaatgatcgctattctaaacgggtgtgagatggtatctcattgtggttttgatttgcatttctctaatgaccagtgatgacgagctttctttcatgtttgttggtcgcataaatgtcttcttttgagaagtatctgttcatatcctttgccyacttttttatgaggttgtttgactttttcttgtaaatttgtttaagttccttgtagattgtggaattagccctttgtcagatggatagattgcaaaaatttcctcccattctgtaggttgcctgttcactctgatgatagtttcttttgctgtgcagaagctctttagtttaattagatcctatttgtcaattttggcttttgttgcaattgcttttggtggtttagtcatgaagtctttgcccatgcctatgtcctgaatggtattggctagcttttcwtctagggttttttatggttttaggttttacgtttacgtctktaatccatctcgagttattttttgtataaggtgtaaggaaggggcccagtttcagttttctgcatatgactagccagttttcccaacactattaaatagagaatccctgttgcttgtttttgtcaggtttgtcaaagatcagatggttgtagatgtgtagtgttatttctgaggcctctgtttatagaatccatttgaaagtgttctttcttcttcaatattttggaatcatttaagaagaactggtgtaagatcttttttaactttttttataatatgaaaaattataatatgaaaaaactataaatcgatcaggtcctgggctctttttattttttgatagggaacttattactgattcaatttcttcacttattggtctattcagattttctattttttaataatgcaatttttgtaggttttatgtgtctaagaatttatccatttcttctaggatattcagtttgttgtcatataattgcttataatagtctcttatgatcctttgtgtttctgtggtatcatttgtaatgtctcctttttcatrttttatctatttgaatattgtctcttttttcttagtttgtctacctaaagatttgtgtgtttatctttaaaaaaaacccaactctttgtttcattgaccttttacattattttttttctctattacatttacttgtgtttttttttcttattacttccttccttctacgaatgttttttttctggttccttgaggtgtagtgttaggctgtttattttagctctttctccttttctgatggaggcatttattgctgtaaacttctctcctagaactgtttttgatgtgtcccataggttttggtataatgtgtttccatttttgtttgtttcaaaaatttttaaacttttagttaatttcttcactggccctttgkctattcaagagmatgttgtttgtttaattctcatgtctctgtaaattctgcaaattttcttctggaattgactatctagttttataacattgtggtcccaaaagatattcgatagaatttcagtcttcttaaatttgcctagattatttctggggcctaatgtatagtctstcctgaaatatgtttcatttgctgttgagaagaaagtatattttgcagcytttggatgaaatgttattttaatgtctgttaagtcatttggtctagaatggactttagatcctttgttgcttttttatccagatgatctattaattgatgaaagtggggtattcaaactccttactattattgttttgcaatcatttctccccttagatttattaatatttgctttatatatttagatgctccaatgttgagtgcatatatttttataattattataacctcttggtgaattcaccccttaatcattatataaagatcttctttgtctctttctatagtttttgacatcaagcctgtgtttttctcatataagtatagctactcctactgtcttttgagttccattttcacaaaatattttgttttttttcctttaattttatccctttccttataggtgaagtgagtaacctatggtcagcattttgttgggtcttgttttaaaaactcactcagtcccggcgcggtggctcacgcttctaatcccagcactttgagaggctgaggcgggcggaccacgaggtcaggagatcgagaccatcctgcttaacacggtgaaaccccatctctactaagaaaaacacaaaaaaattagccgggcgtggtggcgggtgcctgtagtcccagctactggagaggctgaggcaggagaatggcgtgaacctgggaggtggagcttgcagtgagctgagatggcgccactgcactccagcctgggcaacagagcgagactctgtctcaaaaaaaaaaaaaaaaaaaagattattcctaatagatacggtcttactttttgttttcctttgtgtttgtgcgttttctctrgtagcatatttttattccttgctttttattttagtgtgtctattttaagattttgccttgtggtcaccatgaagcttacagaaaatatcttgtagctagattatttatcctagtaacaacttaactttgatcactaaaaaaaccttctaaactttaactcctttcttactttccacattttgaattgttgacctcatttatgtttatcatattacatacctttcaacaaattattttagttgttatttttaatagctttttatttaaccttcatagtaaagatataagtaattttcacactgccatttcttttttagagtattctgaattcgactgttttcaaatgtttttttattactcagtgatttttttctttcagctcgaagaactccctttagcatatcttataagccaggtctggtggtgataaacttgttcagcctttttaacattttttattttttgctttggaaagtctttctcccttatttctgaaggatagatttgctggatacattattcttggttggcagatttttttctttctctagcactttgaatgtatcatcccactatctcctgccctgaakaatttctgctgagaaattttctgcatgctgtattggagctcccttgaatgtgatatgttttttatctcttatttctttgagyatttttctttgtttttcatttttgataatctgattatgatgtgctttataaactcctcttttgttgttccattggcagcctctgagcttccagtacctatttgttgtctttccccagatgaaaaaatttccagccattatttcctaaatatgttttttagacattttcctctctcttttccttcagaaacttctattaggcaagtgttagtttgcttgatggtatcctataattcccataggccttttccatttttgtttattcttttctttttacttctctgaattgataatttcrtatgtcatattttccagctaactggtttttctgcttgatcaaattagttgttgaagcattgtatttaattgttcaattaaattattttattctttattttgaggatttctatttggttcttatttatggtttccactgctttgtcaaacttttaatttgttcatgaattgttttccatatttcatttaactttttatatgcatttgyttgtaatttcttgaacttaagaggatacttctgaggtcttttttggtcatttcatagatctcctagtttgtacttgtaagcataaaggaaaatgagtatttaatatagaacatgtagaattaagtatttatcatcttgagaaaaatattytattattatttgtaattgtaattggcataataaatataataaaaagtaccttatttaatttcccaaatatcttattatatttttaagatattaccttataaatatgtagacagactaaaattgaatagcagtgtagaatcttgaacatttgagaacttgaaaaatgacatggttgtttttggattaacctttttcattcactcattaatcttttgttgactgaataaagatatccaartgtcgttattatagtaattttctttcctaaatttcatgatttggagagcttggtggtaagattttttgctcattacaagtattgatctgggacagatctggtgctgcttaaggaaagactaatamcatgtcccaagttctcctggttatttttatttaaatactgctggggaaaaggtggtggaaaattattttattccatttgtgtatataaatcactatgcatattttttactttttatattttacatgttatcttagcaaaaagaatattaatagtttcaaccaagcaaaataaatatgaaggctggattattaaaagtgacttttgcatttttaaccacattttatctttgaatttagtatcatatacaggagatatgaaaataaaagacatttatttttataacagtattaaaaatctattgaagtattgattgaagaaattcagttgaagtatttttgtaaacattgtgattatgtgggttattaagatacatacaaatgtggttttaaaattcaacaagagtaaggccaatatattttagcatgtgtaatttgtaaaaatacatgtttgtatttgtagtaaaacttatacacaagatcaaatatgtaaatattaaaggagaagragttgtatatgtatgtaaattgtttcttatttgaatgacatttagatactgtcatctaggtttagctatattttacagtacaaatttaattaaaatatatgctatggaagtattttaatgattttaggttgaagttataaaaacattcccatatttatttctttccaataaggaaaatttgtcagagcatataacacaccatttattcttcacttcattattttatctaccttttcctatgtgtcttttaattcttaatakttactaaaatttctatatcaaggaataatacacagagcttttaccttcaagttatttagtattggaatagtgcacaaaattataaacattgagataatgcaggcagaataaagtacccaagtaggtttgagaaatgcaccatcagctttcactgaattatgaaatcccaaatactgctgaagggtcaacaatgaaagacagttgtactgagaaggtaaagttttgaacgtctcttcatttatatagagggtttccccttgatagggaactgaggataaatatttgaagaaatatgrtggaggtttccagcaatactcataataattgaaacatctaattaaaatagggctaacatcattcatcagcctcacaatatcagctgttttccaagaacttcttatcactgggcctcttgtttttttatactaatgtatgtttgtttgtttcattcccctcccccaacctccacagaaaaacccttgtgaagagagaggatgggtgttcacaatttgttcacggtgactcagtttatccttatagggctctcttacttctccaatgagcactaccttctttttgtggcccttgccattatctgtcaggtgttcttggtgcgaagtggagacattctcttggccattgggactgtgattaagttgcacactactcatgtattattttttggcaaatgtgtccatcttagacatattgtgttcatcagctactatacctaagatgcctaagattctctagactgaggatcacagcatttcttttgttaggtgagctttgcagccctatttcctagtggcctgggctgggaagaaagctttctcactgttacggcttatgactggtgtgtggtcacatgtttctccctttgttacatcctgatcatgaacaaattggctctgtccagctggtttatgggacctgagcagctgggtttctaaatttcctcctcctccacgtagtgtctaccctctgcctgtctttctgcaagcctgatcgagttaaccagtattactgtgatatctcaccratgggggccctgttgtgccagtccatgcacctggcaaacatgcttgttttagtggaatcagttatcttggggatcagtgcttttctggctgcctttaacttttacatatacatcatctccactatcctaaagatccagtgtgtagagtggagtgcaaagtgcttctctacatgcacttcccacctccttacggtctgtttgttctatggcatattgacatttacctacatttactccttctccagtcaacactcacatgtctaaggcaagcccagatctagccacagacaggctcatctctatgctatacagagttattaccctgatgtttaacttcatcactgacaacctgagaaacacagaggtaaaaggagcctcagaaaggttttatgtcattgaacatgtttatagaaaccataatttaaaatataatagaatgactcaatgttccacttttaattcatagaaaaagtaattttctattgatatatagaatgyatacctacataggcgtataaatttatagaaaatacatatacatataacttcagttatatctatttatatgtatatgtatatttctatttgtgtacattgggaacttaacatttatcagccaaagtagactttttttttttttttaagttcyggggtacatgtacaggatgtgcaggtttgttatgtaggtaaacatgtgccatggtggtttgctgcacctaycaacccatcacctaggtattaagaccagcatgccttagctttttttcctgatactctccctctctacgccaccctccacccaacaggtcctagtgtgtgttattccctgtagactttttcagaataaatcaggaactgttagtagtaattacactggtataagatgtttaaaataggcctgtcttaggctgggcgcggtgcctcacacytgtaatctcagcactttgggaggcagaggcaggtggattacctgaggacaggagtttgagaccagcctggctaacatagygaaaccctgcctctactaaaaatacaagaaattagccagatgtggtggttggtgcatgtagtcccagctacttgggaggctgaggcaggagaatcacttgaaccccagaggctgggttgcagtgagctgagatcgtgccactgcactcaagcctgggtgacagagtgagactctgtctcaataaataaataaaatggtcctatcttaagtaaacttggatctataacacttaactatattcatactcatgcttgtacccatagccatatttatgtctaccaatatctatattgtgtgtgtctatatggtttatatctggctttcaacctgtatttaatctagctgtaggtgttttctttaatttttttcttttaattgttcatttacacttggaaattgctaagagagtgaatcttaaatgtaatcacaataaaagataattatgtgaggtgatggatatgtaaattcattttgtttgataacttcacagtttatacctatataaaagcatcacattgcatactataaatatatgtrtrtgtgtgtgtgtgtgtgtgtgtgtgkgtgtaaactataccttaaggctgggggaataagctaaagtggtcaacataacctattatatgataaagatatatctatgttggaaatttttctgatattgttatcaaatatgtaagatttaaatgacagtattttcattatattatttgtaacctgtgtaaatggaataaaatacccatttatggctatctggtgaaactgttgrgaagtaaagcctgtgcattgatcacccttctatgtttgttgttattgatacttctcctttttgttgacataacatgctatgacttcttctgtagttttactttcaacctacttgttttgttactttatgtgagtttctcatagacagtttatagttcaattatgtatttttatccagtgtccaatctctgtctttcaatttgcatatattattgcatcatttacttttaaggtaatcattaatatgctacaatttgtcgactttttaatttgttttgtgtttgtttcttctgtcttttatttctctgcttttcatttattgattttctgatgttttctttaagatttttaaggattctaacttrtgtatagcatttttattacatcacaatgtatagtttttttataccaactaatgttgttataatttttctttcaaccataaaatataatttaaggaactcatgagagaaatatagtatattgtaattatttctctttgtacaaaatttgytttttcctgtatgacattgtggctttcctatctctgtagaaaaccatatatactgtactcttaaaaatactaagagagtgggtatacagtgtttccaccatgaaaatgataattatgtgaggtaatgcatatcatatgttaattaactaaatgtagtcactccacaatgcatctrtacttcaaaatgttaggctgtaaacaataatacataaattttatgtcaattatttttgaattacaaaaaaatgaatgcaagttgatctcaaaaagatgtcataaagaataaataaaatgagaacacaatatcaacaaattatatgaacctaacaaaatagyctaaaaaataaaccaatagtattctattttcagaaatatcaaatatgtaaataccttaataaacttgaaaatgcatgcattaaactaatactgtatactatactctcccaaaaaaagagtggagattatttaccagcacatataaaacaacttaaaaatggataatttatttcaccctaaaaatgagtctcaataaattccaaaggttcaaagaattacaaatattgtggaatgtgtaatacatgtatgcacatgtggatatatgtatatctgtacatataggtatatatatgtgtgagtgcacatttgtatgtaagaccattatgaagctatctctagattatattgttaagtaaaaaaaaagtataatgcagaaagggatttttaatatttgcttatattacagttatgttacatataacatataatgaaacattgcatatatacatatatataacagtttatgatatatataacatatatgtataacagttctatatccaaggttatataacatatatcyaaggttatatatataacagtttatgatatatataacaacatgacattacatatacatatacagtaaagttatatataatatgttatatataacataagtgttatatatgttatataacatgttactaatatatgtcacatatataaaacaaaatgttataattataaaacaaaatgttatacgtgtaaaacatgaaatgttttatcattttctttatcaatttatctgatgatggacacaactgctycagatgtatttgtaagacaaaattccaacatgttttcataattgtggaaatatattgtaaaaatatgctttactaatcacagcaaatgatrtatttcttccaacttgttataagatgtgttgtatattgtatatttttattatgtagcctcagttttggcattctcactctctcaacctaactttatttcatgatttagtttgtgacttcaaatctgcatttatgatacatttgctagtagatactcatagcaactgccatagtatagacacccatttctcatcccatctatgttacatccaaattttttcaggggtgccaagtgcctaattttagaatatactcttccaattggtacttacaacttgaaatggtgtaataatatagctatagccaatgagatgtagcttatacttactgggttatccttataaaaataataggcagtgcttcatttgcctcatgaaatctctgtccttagccttcattctacttgggttatggatgagacgcctagtaatacaaaagccattcatgatcctagggaaaacaatattgaagggcagaacaagatgactgaaggtgcctgtttcattgatggacccattgaaccgccatacacactattgactgcctgcctaatgtcagactaatgttgcatgaggcataagtgtactcactggtttaaaaggactggagtaatattctgtcactttttcctgaacacatggagactttagagtttgcccaataattttattcagtagagcacgatttttctccaatgaaatctaaataacgtaatgaggttcaaccccagagtagatacctcattatcacaatgctgtaagtgaatgaacccagcctattaagcaagggaaaatttatcacacacactacttctctcyagctcacattcacataccaacaaataaatggcacaaaatacacaaaatgttttgtgatatttgcatgtatgatgtgcacatgcacrtataggtaaatatttgtgtatatgcatatataagtattcgaagttatgtacatatttttggaaaatgttggaatatatattatgacatatatttatgtgagggtattgtgcatattgctttatgaatattcttcacataaagagtacagaattttggagacaatgagactgctaggaagaaggcaggaataagagggaagggaaaattggagtggaggtaagtatgaaaaaycagtaaaatctgagatgctctagaagatggttctggagtacagaagtgatgttgcatgttgaaactactagtgtttcagaaatgcaaacaccttcctaattcctgcctgcatctccctattctggaagctgtacaccatcgggtttaatgtgggagtcacaagagtatagagtgcagctaccaccttgtctctttcaaatgtatagctggaagcagggcggatataggtgtagattacaggagaatagtaaagggtcaccactgtgagatgagatgagcatgttgagaaggccttcctmttgccttctactgtgcggatacrgagaatagcaacaatgataaaaccataggagatgcaggtaagaataaagtcccctatggccagggtaatatcagcaacatacaccatcacctcrttgattcttasagggctacaggacaaagccagcaatgggggtatctcacagaagaagtggtcaatggtgtttggcccacagaaagtcaacctcatgataagagctgtgtgcacccaggaattggtgactgcaatagccatgaccatgctgagcaaggctacacacatatggtggttcataayagtactgtaatgaagagggaaacaaatggccacatagcggtcataggccatggtggtraagagaaccatctcagctcccagagaccatgtgaacaagaagagctgggacatgcagcctgcatawgaamtggtattttctgatgttagcatggtccccagcatcttcggtatgatgcttgttgtgcagatgatgtccacaacagccagtgtcagaaggaaaacatacatgggcgtatgcaaggtgttgttatagattwtggcaatgatgatgagcatgttgccgagaaaagccacaagatagacaatgagaaaaaagaggaagataattccctggagttcaggctttttggtgaggcccagaataatgaactcagttacaacgctgtgattcatcctgcttgggtgattgaatggcagtaattgcacagaataaacaactgaaaatggaaagaatccctgtgttgttaggagataacatgaggagtgtgtgtacttagggacttaattcttgattggacacaactttgcagcaggaattcccatwtgatggagttctgtattccaggcaatatactctgttttccagactaatcccattctctgatgtatgttcctccattgatgactcaaactgaagccagtggttgagaagaaaaatattttcaaaatgccttcaaatattttgatatcattttcacttaaaacttgtytaaatacacacacacatatatatatatacacacacatatgtatatattctggatatgcatatatatccaatggagctgtaatacaaattattacatacctcaataatttagttaattgcatggtacatttaggtgtccttgagatatacaygagcaaagatacttgaaataatacaagctgacagggctaattatagtgaggatatttcagatgaaaaatgcccaacctagtattttgaggctgtatattcatgggaacattgactaatgtatcacagtccaaatactaaacaatttaatcaaatgtctgtattagtagtttttcatcggtttgagaagcacattgccaaaattcactggaccagctatttgttttgctgttatataatggcaagataattggatttaaaaatataaaatgtarggttgtgtcttcatttcatcatagctatagattggccatttaagctctgtaagatttggatttattatttctaaacattgaataaattgaaataaatatcagatgttagag
